(19) United States
(12) Patent Application Publication
(10) Pub. No.: US 2023/0272041 A1
(43) Pub. Date: Aug. 31, 2023

(54) Formulation, Dosage Regimen, and Manufacturing Process for Heterodimeric FC-Fused Proteins

(71) Applicant: Dragonfly Therapeutics, Inc., Waltham, MA (US)

(72) Inventors: Mitchell Bigelow, Cambridge, MA (US); Alexandra Braun, Cambridge, MA (US); Ann F. Cheung, Lincoln, MA (US); Jean-Marie Cuillerot, Somerville, MA (US); Mark Derose, Wilmington, MA (US); Asya Grinberg, Lexington, MA (US); Eva Gutierrez, Waltham, MA (US); Patrick Kirby, Boxborough, MA (US); Christopher Ryan Morgan, Southborough, MA (US); Michael C. Naill, Stow, MA (US); Steven O'Neil, Wayland, MA (US); Michael Shifrin, Medford, MA (US); Nicolai Wagtmann, Concord, MA (US)

(21) Appl. No.: 17/920,174

(22) PCT Filed: Apr. 22, 2021
(86) PCT No.: PCT/US2021/028701

§ 371 Date: Oct. 20, 2022

Related U.S. Application Data
(60) Provisional application No. 63/013,834, filed on Apr. 22, 2020.
(60) Provisional application No. 63/033,161, filed on Jun. 1, 2020.

(51) Int. Cl. C07K 14/735; A61K 31/7016; A61K 47/14; A61K 9/00; A61P 35/04; C07K 16/28; A61K 38/20; A61K 9/19

(52) U.S. Cl. CPC C07K 14/70535; A61K 31/7016; A61K 47/14; A61K 9/0019; A61P 35/04; C07K 16/2896; A61K 38/208; A61K 9/19

(57) ABSTRACT

The present invention relates to pharmaceutical formulations for heterodimeric Fc-fused proteins which are advantageous for achieving higher titers of the proteins during production, higher stability during storage, and improved efficacy when used as a therapeutic. Also provided are dosage regimens for such heterodimeric Fc-fused proteins and pharmaceutical formulations for use in treating cancer, such as locally advanced or metastatic solid tumor.

### CROSS-REFERENCE TO RELATED APPLICATIONS

[0001] This application claims priority to and benefit of U.S. Provisional Application No. 63/013,834, filed on Apr. 22, 2020, and U.S. Provisional Application No. 63/033,161, filed on Jun. 1, 2020, each of which is hereby incorporated by reference herein in its entirety.

### SEQUENCE LISTING

[0002] The content of the electronically submitted sequence listing in ASCII text file (Name: 3338_259PC03_Seglisting_ST25.txt; Size: 946,336 bytes; and Date of Creation: Apr. 21, 2021) filed with the application is incorporated herein by reference in its entirety.

### FIELD OF THE INVENTION

[0003] The present disclosure relates to pharmaceutical formulations and dosage regimens for heterodimeric Fc-fused proteins, and methods of using such proteins to treat cancers.

### BACKGROUND

[0004] Physiologically active proteins mostly have the disadvantage of having a short in vivo half-life. In order to solve this disadvantage, there has been an attempt to conjugate them to PEG (polyethylene glycol) or the like, or to fuse them to an antibody Fc (crystallizable fragment) region. Proteins composed of two or more different subunits, in which the two or more different subunits form a protein complex to exhibit physiological activity, can be fused to wild-type Fc domains to prepare Fc-fused protein forms, forming a homodimer due to the homodimeric nature of Fc. Proteins composed of two or more different subunits, in which the two or more different subunits form a protein complex to exhibit physiological activity, can also be fused to heterodimeric Fc regions derived not only from IgG1, but also from other isotype antibodies such as IgG2, IgG3 and IgG4, to form a heterodimeric Fc-fused protein. Thus, one or more subunit(s) of the protein, which is composed of two or more different subunits and in which two or more subunits exhibit physiological activity by forming a protein complex, can be fused to the terminus of heterodimeric Fc variant regions to form improved Fc-fused protein forms.

[0005] Fc heterodimerization is a technology that induces mutations in two different CH3 domains of Fc by genetic engineering, such that the two Fc fragments form a heterodimer with minimal sequence variations while they have tertiary structures very similar to those of naturally occurring antibodies (see, e.g., U.S. Pat. No. 7,695,936).

[0006] The inventions described in the present disclosure provide designs for improving the Fc-fused protein forms, in which the two subunits of a heterodimeric protein are connected to two Fc domains having different heterodimerization domains, by introducing linkers of varying lengths, or mutations in the CH2 and the CH3 domains of the Fc. Further the inventions described in the present disclosure provides pharmaceutical formulations for such proteins, method of making such proteins and formulations, and methods for treating cancer using such proteins.

### SUMMARY

[0007] The invention generally relates to pharmaceutical formulations comprising certain heterodimeric Fc-fused proteins comprising IL12 subunit(s), processes for preparing such proteins and pharmaceutical formulations. Also provided are dosage regimens for using such heterodimeric Fc-fused proteins and pharmaceutical formulations to treat cancer, such as locally advanced or metastatic solid tumors.

[0008] Accordingly, in one aspect, provided herein is a pharmaceutical formulation comprising a heterodimeric Fc-fused protein comprising a first polypeptide comprising a first antibody Fc domain polypeptide and a first subunit of a multisubunit cytokine and a second polypeptide comprising a second antibody Fc domain polypeptide and a second, different subunit of the multisubunit cytokine, citrate, a sugar, a sugar alcohol, and a non-ionic surfactant, at pH 6.0 to 7.0, wherein the first and second antibody Fc domain polypeptides each comprise different mutations promoting heterodimerization, and wherein the first subunit and second, different subunit of the multisubunit cytokine are bound to each other. In some embodiments, the first and/or second antibody Fc domain polypeptides comprise one or more mutation(s) that reduce(s) an effector function of an Fc.

[0009] In some embodiments, the concentration of citrate in the pharmaceutical formulation is about 10 mM to about 30 mM. In certain embodiments, the concentration of citrate in the pharmaceutical formulation is about 20 mM. In some embodiments, the concentration of the sugar in the pharmaceutical formulation is about 3% to about 12% (w/v). In certain embodiments, the concentration of the sugar in the pharmaceutical formulation is about 6% (w/v). In certain embodiments, the sugar is a disaccharide. In certain embodiments, the disaccharide is sucrose. In some embodiments, the concentration of the sugar alcohol in the pharmaceutical formulation is between about 0.5% to about 6% (w/v). In certain embodiments, the concentration of the sugar alcohol in the pharmaceutical formulation is about 1% (w/v). In certain embodiments, the sugar alcohol is derived from a monosaccharide. In certain embodiments, the sugar alcohol is mannitol.

[0010] In some embodiments, the concentration of the non-ionic surfactant in the pharmaceutical formulation is between about 0.005% to about 0.02% (w/v). In certain embodiments, the concentration of polysorbate 80 in the pharmaceutical formulation is about 0.01% (w/v). In certain embodiments, the non-ionic surfactant is a polysorbate. In certain embodiments, the polysorbate is polysorbate 80.

[0011] In some embodiments, the pH is between about 6.1 and about 6.9. In certain embodiments, the pH is between about 6.2 and about 6.8. In certain embodiments, the pH is between about 6.3 and about 6.7. In some embodiments, the pH is between about 6.4 and about 6.6. In certain embodiments, the pH is about 6.5.

[0012] In some embodiments, the pharmaceutical formulation further comprises water. In certain embodiments, the water is Water for Injection, USP.

[0013] In some embodiments, the pharmaceutical formulation comprises a bulk concentration of heterodimeric Fc-fused protein of about 1 g/L to about 10 g/L. In certain embodiments, the pharmaceutical formulation comprises a bulk concentration of heterodimeric Fc-fused protein of about 2 g/L to about 8 g/L. In certain embodiments, the pharmaceutical formulation comprises a bulk concentration of heterodimeric Fc-fused protein of about 4 g/L to about 6 g/L. In certain embodiments, the pharmaceutical formulation comprises a bulk concentration of heterodimeric Fc-fused protein of about 5 g/L.

[0014] In some embodiments, the pharmaceutical formulation comprises a concentration of the protein for administration of about 0.5 g/L to about 1.5 g/L. In certain embodiments, the pharmaceutical formulation comprises a concentration of the protein for administration of about 0.75 g/L to about 1.25 g/L. In certain embodiments, the pharmaceutical formulation comprises a concentration of the protein for administration of about 1 g/L.

[0015] In some embodiments, the formulation is designed to be stored at a temperature between 2° C. and 8° C. In some embodiments, the pharmaceutical formulation is a clear, colorless solution and free of visible particulates.

[0016] In some embodiments, the formulation has a thermal stability profile as defined by a Tₘ₁ of greater than about 60° C., greater than about 61° C., greater than about 62° C., greater than about 63° C., greater than about 64° C., greater than about 65° C., or greater than about 66° C.; and/or a Tₘ₂ of greater than about 70° C., greater than about 71° C., greater than about 72° C., greater than about 73° C., greater than about 74° C., greater than about 75° C., greater than about 76° C., or greater than about 77° C., as measured by differential scanning fluorimetry. In certain embodiments, the formulation has a thermal stability profile as defined by a Tₘ₁ of about 67.0° C. and a Tₘ₂ of about 77.3° C. In certain embodiments, the thermal stability profile of the pharmaceutical formulation, as defined by Tₘ₁ and/or Tₘ₂ is changed by less than about 2° C. or less than about 1° C. when the pharmaceutical formulation is incubated for 1 week at 50° C., as compared to the same pharmaceutical formulation that is incubated for 1 week at 5° C., as measured by differential scanning fluorimetry.

[0017] In some embodiments, the formulation has a thermal stability profile as defined by a T_{agg} of greater than about 60° C., greater than about 61° C., greater than about 62° C., greater than about 63° C., greater than about 64° C., greater than about 65° C., greater than about 66° C., or greater than about 67° C., as measured by differential scanning fluorimetry. In certain embodiments, the thermal stability profile of the pharmaceutical formulation, as defined by T_{agg} is changed by less than about 2° C. or less than about 1° C. when the pharmaceutical formulation is incubated for 1 week at 50° C., as compared to the same pharmaceutical formulation that is incubated for 1 week at 5° C., as measured by differential scanning fluorimetry.

[0018] In some embodiments, the pH of the pharmaceutical formulation does not change by more than about 0.2 or about 0.1 in pH value after the pharmaceutical formulation is incubated for 1 week at 5° C. In some embodiments, the pH of the pharmaceutical formulation does not change by more than about 0.2 or about 0.1 in pH value after the pharmaceutical formulation is incubated for 1 week at 50° C.

[0019] In some embodiments, the heterodimeric Fc-fused protein in the pharmaceutical formulation has a Z-average hydrodynamic diameter of less than about 15 nm, less than about 14 nm, less than about 13 nm, or less than about 12 nm, as measured by dynamic light scattering at 25° C. In certain embodiments, the heterodimeric Fc-fused protein in the pharmaceutical formulation has a Z-average hydrodynamic diameter of about 11.6 nm. In some embodiments, the heterodimeric Fc-fused protein in the pharmaceutical formulation has a Z-average hydrodynamic diameter of less than about 20 nm, less than about 19 nm, less than about 18 nm, less than about 17 nm, less than about 16 nm, or less than about 15 nm, as measured by dynamic light scattering at 25° C., after the pharmaceutical formulation is incubated for 2 weeks at 50° C. In certain embodiments, the heterodimeric Fc-fused protein in the pharmaceutical formulation has a Z-average hydrodynamic diameter of about 14.4 nm. In some embodiments, the heterodimeric Fc-fused protein in the pharmaceutical formulation has a Z-average hydrodynamic diameter of less than about 20 nm, less than about 19 nm, less than about 18 nm, less than about 17 nm, or less than about 16 nm, as measured by dynamic light scattering at 25° C., after the pharmaceutical formulation is subjected to five freeze thaw cycles. In certain embodiments, the heterodimeric Fc-fused protein in the pharmaceutical formulation has a Z-average hydrodynamic diameter of about 15.3 nm.

[0020] In some embodiments, the polydispersity index of the heterodimeric Fc-fused protein in the pharmaceutical formulation is less than about 0.30, less than about 0.29, less than about 0.28, or less than about 0.27, as measured by dynamic light scattering at 25° C. In some embodiments, the polydispersity index of the heterodimeric Fc-fused protein in the pharmaceutical formulation is about 0.26. In some embodiments, the polydispersity index of the heterodimeric Fc-fused protein in the pharmaceutical formulation is less than about 0.30, less than about 0.29, less than about 0.28, less than about 0.27, or less than about 0.26, as measured by dynamic light scattering at 25° C., after the pharmaceutical formulation is incubated for 2 weeks at 50° C. In some embodiments, the polydispersity index of the heterodimeric Fc-fused protein in the pharmaceutical formulation is about 0.25. In some embodiments, the polydispersity index of the heterodimeric Fc-fused protein in the pharmaceutical formulation is less than about 0.40, less than about 0.35, or less than about 0.34, as measured by dynamic light scattering at 25° C., after the pharmaceutical formulation is subjected to five freeze thaw cycles. In some embodiments, the polydispersity index of the heterodimeric Fc-fused protein in the pharmaceutical formulation is about 0.33.

[0021] In some embodiments, the purity profile of the pharmaceutical formulation, as measured by the area of the main peak as a percentage of total detected area in a SEC-HPLC analysis, is greater than about 90%, greater than about 91%, greater than about 92%, greater than about 93%, greater than about 94%, greater than about 95%, greater than about 96%, greater than about 97%, greater than about 98%, or greater than about 99%. In certain embodiments, the purity profile of the pharmaceutical formulation, as measured by the area of the main peak as a percentage of total detected area in a SEC-HPLC analysis, is about 99.0%.

[0022] In some embodiments, the purity profile of the pharmaceutical formulation, as measured by the area of the main peak as a percentage of total detected area in a SEC-HPLC analysis, is greater than about 75%, greater than about 80%, greater than about 81%, greater than about 82%, greater than about 83%, greater than about 84%, or greater than about 85%, after the pharmaceutical formulation is incubated for 2 weeks at 50° C. In certain embodiments, the purity profile of the pharmaceutical formulation, as measured by the area of the main peak as a percentage of total detected area in a SEC-HPLC analysis, is about 85.2%.

[0023] In some embodiments, the purity profile of the pharmaceutical formulation, as measured by the area of the main peak as a percentage of total detected area in a SEC-HPLC analysis, is greater than about 90%, greater than about 91%, greater than about 92%, greater than about 93%, greater than about 94%, greater than about 95%, greater than about 96%, greater than about 97%, or greater than about 98%, after the pharmaceutical formulation is subjected to five freeze thaw cycles. In certain embodiments, the purity profile of the pharmaceutical formulation, as measured by the area of the main peak as a percentage of total detected area in a SEC-HPLC analysis, is about 98.9%.

[0024] In another aspect, the disclosure provides for a method comprising administering to a subject in need thereof, the pharmaceutical formulation as a single-dose therapy.

[0025] In another aspect, the disclosure provides for a method comprising administering to a subject in need thereof, the pharmaceutical formulation in a multiple-dose therapy at an interval of at least three weeks between the doses or at least four weeks between the doses. In some embodiments, the pharmaceutical formulation is administered to the subject once every three weeks. In some embodiments, the pharmaceutical formulation is administered to the subject once every four weeks. In certain embodiments, the pharmaceutical formulation is administered to the subject once every six weeks.

[0026] In some embodiments, the method further comprises stopping the multi-dose therapy if the subject develops progressive disease, unacceptable toxicity, or meets a criterion for withdrawal. In some embodiments, if the subject experiences a complete response (CR) during the multi-dose therapy, then the multi-dose therapy is further administered for at least 12 months after the confirmation of the complete response. In certain embodiments, the total duration of the multi-dose therapy is equal to or less than 24 months. In certain embodiments, the total treatment duration is greater than 24 months.

[0027] In some embodiments, the pharmaceutical formulation is administered by subcutaneous injection.

[0028] In some embodiments, the pharmaceutical formulation is administered to the subject in an amount sufficient to provide the heterodimeric Fc-fused protein at a dosage of between about 0.05 μg/kg to about 1.75 μg/kg, based on the subject's weight. In some embodiments, the pharmaceutical formulation is administered to the subject in an amount sufficient to provide the heterodimeric Fc-fused protein at a dosage of about 0.05 μg/kg, about 0.10 μg/kg, about 0.20 μg/kg, about 0.40 μg/kg, about 0.60 μg/kg, about 0.80 μg/kg, about 1.00 μg/kg, about 1.20 μg/kg, about 1.40 μg/kg, or about 1.75 μg/kg, based on the subject's weight. In certain embodiments, the pharmaceutical formulation is administered to the subject in an amount sufficient to provide the heterodimeric Fc-fused protein at a dosage of greater than 0.00 μg/kg and less than about 0.05 μg/kg, based on the subject's weight. In certain embodiments, the pharmaceutical formulation is administered to the subject in an amount sufficient to provide the heterodimeric Fc-fused protein at a dosage of greater than about 1.75 μg/kg, based on the subject's weight.

[0029] In some embodiments, the subject has cancer. In certain embodiments, the subject has a locally advanced or metastatic solid tumor. In certain embodiments, the presence of the cancer in the subject is confirmed using the Response Evaluation Criteria for Solid Tumors (RECIST), version 1.1. In certain embodiments, the cancer is selected from the group consisting of: melanoma, non-small cell lung cancer (NSCLC), small cell lung cancer (SCLC), head and neck squamous cell carcinoma (HNSCC), classical Hodgkin lymphoma, primary mediastinal large B-Cell lymphoma, bladder cancer, urothelial carcinoma, micro-satellite instability high cancer, colorectal cancer, gastric cancer, oesophageal cancer, cervical cancer, hepatocellular carcinoma, Merkel cell carcinoma, renal cell carcinoma (RCC), endometrial carcinoma, cutaneous T cell lymphoma, and triple negative breast cancer. In certain embodiments, the cancer is selected from the group consisting of: melanoma, non-small cell lung cancer (NSCLC), small cell lung cancer (SCLC), head and neck squamous cell carcinoma (HNSCC), classical Hodgkin lymphoma, primary mediastinal large B-Cell lymphoma, bladder cancer, urothelial carcinoma, micro-satellite instability high cancer, colorectal cancer, gastric cancer, oesophageal cancer, cervical cancer, ovarian cancer, prostate cancer, hepatocellular carcinoma, Merkel cell carcinoma, renal cell carcinoma (RCC), endometrial carcinoma, cutaneous T cell lymphoma, and triple negative breast cancer. In certain embodiments, the subject is anti-PD-1 refractory.

[0030] In some embodiments, the subject has melanoma. In certain embodiments, the subject has previously been treated with an anti-PD-1 antibody for at least 6 weeks. In certain embodiments, the subject has been confirmed of progression of disease at least 4 weeks after the initial diagnosis of progression of disease while receiving an anti-PD-1 antibody. In certain embodiments, progression of disease is confirmed by radiological or clinical observation. In certain embodiments, if the subject has a tumor comprising a BRAF activating mutation, then the subject has previously been treated with a BRAF inhibitor.

[0031] In some embodiments, the subject has RCC. In certain embodiments, the RCC has clear cell histology. In certain embodiments, the patient has previously been treated with an anti-PD-1/PD-L1 antibody and/or an anti-vascular endothelial growth factor therapy. In certain embodiments, the subject has previously received three or fewer lines of therapy.

[0032] In some embodiments, the subject has urothelial carcinoma. In certain embodiments, the subject has locally advanced or metastatic transitional cell carcinoma of the urothelium. In certain embodiments, the subject has previously been treated with a single treatment comprising a platinum-containing regimen and has shown radiographic progression recurrence within 6 months after the last administration of the platinum-containing regimen. In certain embodiments, the subject has previously received two or less lines of therapy. In certain embodiments, the subject has not previously received a checkpoint inhibitor (e.g., anti-PD-1 or anti-PD-L1 antibody) therapy as a monotherapy or in combination with a platinum based chemotherapy.

[0033] In some embodiments, the pharmaceutical formulation is administered to the subject as a monotherapy.

[0034] In some embodiments, the pharmaceutical formulation is administered to the subject as a combination therapy.

[0035] In some embodiments, the method further comprises administering to the subject an anti-PD-1 antibody. In certain embodiments, the anti-PD-1 antibody is pembrolizumab. In certain embodiments, the pembrolizumab is administered intravenously. In certain embodiments, the pembrolizumab is administered at a dose of 200 mg. In certain embodiments, the administration of pembrolizumab precedes each administration of the pharmaceutical formulation. In certain embodiments, the pharmaceutical formulation is administered within 1 hour after completion of administration of pembrolizumab.

[0036] In certain embodiments, the anti-PD-1 antibody is nivolumab. In certain embodiments, the nivolumab is administered intravenously. In certain embodiments, the nivolumab is administered at a dose of about 480 mg. In certain embodiments, the administration of nivolumab precedes each administration of the pharmaceutical formulation. In certain embodiments, the pharmaceutical formulation is administered within 1 hour after completion of administration of nivolumab.

[0037] In some embodiments the combination therapy is for treatment of a cancer selected from the group consisting of: melanoma, NSCLC, SCLC, RCC, classical Hodgkin lymphoma, HNSCC, urothelial carcinoma, colorectal cancer, hepatocellular carcinoma, and oesophageal cancer. In some embodiments the combination therapy is for treatment of a cancer selected from the group consisting of: melanoma, NSCLC, SCLC, RCC, classical Hodgkin lymphoma, HNSCC, urothelial carcinoma, colorectal cancer, hepatocellular carcinoma, oesophageal cancer, gastric cancer, ovarian cancer, and prostate cancer. In some embodiments, the cancer is melanoma. In some embodiments, the melanoma is unresectable. In some embodiments the cancer is colorectal cancer. In some embodiments, the colorectal cancer is microsatellite instability-high (MSI-H) or mismatch repair deficient metastatic (dMMR) colorectal cancer.

[0038] In some embodiments, the method further comprises performing a surgical intervention to lyse cancer cells, remove a tumor, or debulk a tumor in the subject. In certain embodiments, the surgical intervention comprises cryotherapy. In certain embodiments, the surgical intervention comprises hyperthermic therapy. In certain embodiments, the surgical intervention comprises administering to the subject a radiotherapy. In certain embodiments, the radiotherapy is a stereotactic body radiation therapy (SBRT).

[0039] In some embodiments, the method further comprises administering to the subject an NK cell-targeting therapy. In certain embodiments, the subject is administered a multi-specific binding protein. In some embodiments, the method further comprises administering to the subject a chimeric antigen receptor therapy. In some embodiments, the method further comprises administering to the subject a cytokine therapy. In some embodiments, the method further comprises administering to the subject an innate immune system agonist therapy. In some embodiments, the method further comprises administering to the subject a chemotherapy. In some embodiments, the method further comprises administering to the subject a targeted antigen therapy. In some embodiments, the method further comprises administering to the subject an oncolytic virus therapy.

[0040] In another aspect, the disclosure provides for a method of detecting toxicity in a subject receiving a pharmaceutical formulation comprising measuring the concentration of C-reactive protein (CRP) in the subject's blood, wherein the pharmaceutical formulation comprises a heterodimeric Fc-fused protein and a pharmaceutically acceptable carrier, and wherein the heterodimeric Fc-fused protein comprises a first Fc region and a second Fc region of an immunoglobulin Fc (fragment crystallizable) pair and the p40 and p35 subunits of IL-12, wherein the p40 and p35 subunits of IL-12 are linked separately to the first Fc region and the second Fc region, or to the second Fc region and the first Fc region, respectively, wherein the p40 and p35 subunits are each linked to the N-terminus or C-terminus of the Fc regions, and wherein CH3 domains of the first Fc region and the second Fc region each comprise one or more mutations promoting heterodimerization. In some embodiments, if the CRP concentration in the subject's blood is higher than a threshold CRP concentration, then the subject is identified as being at risk for developing an adverse drug reaction; and if the CRP concentration in the subject's blood is about the same or lower than the threshold C-reactive protein concentration, the subject is not identified as being at risk for developing an adverse drug reaction. In certain embodiments, if the CRP concentration in the subject's blood is higher than the threshold CRP concentration, then the administration of the pharmaceutical formulation is paused, the heterodimeric Fc-fused protein is administered at a lower dose, or a remedial action is taken to reduce or alleviate the formulation's toxicity effects in the subject.

[0041] In some embodiments of the pharmaceutical formulation or the method described herein, the first and second antibody Fc domain polypeptides are human IgG1 Fc domain polypeptides. In certain embodiments, the multisubunit cytokine is a human IL12. In certain embodiments, the human IgG1 Fc domain polypeptides comprise one or more mutation(s) that reduce(s) an effector function of an Fc. In certain embodiments, the first and second antibody Fc domain polypeptides comprise mutations selected from L234A, L235A or L235E, G237A, P329A, A330S, and P331S, numbered according to the EU numbering system. In certain embodiments, the first and second antibody Fc domain polypeptides each comprise mutations L234A, L235A, and P329A. In certain embodiments, the first subunit of a multisubunit cytokine is a p40 subunit of IL12 and the second subunit of a multisubunit cytokine is a p35 subunit of IL12. In certain embodiments of the pharmaceutical formulation or the method, the first subunit of a multisubunit cytokine comprises the amino acid sequence of SEQ ID NO: 127 and the second subunit of a multisubunit cytokine comprises the amino acid sequence of SEQ ID NO: 128. In certain embodiments of the pharmaceutical formulation or the method, the second subunit of a multisubunit cytokine is fused to the second antibody Fc domain by a linker comprising the amino acid sequence of SEQ ID NO: 108. In certain embodiments of the pharmaceutical formulation or the method, the first antibody Fc domain comprises mutations L234A, L235A, P329A, Y349C, K360E, and K409W, and the second antibody Fc domain comprises mutations L234A, L235A, P329A, Q347R, S354C, D399V, and F405T. In certain embodiments of the pharmaceutical formulation or the method, the first antibody Fc domain comprises the amino acid sequence of SEQ ID NO:215, and the second antibody Fc domain comprises the amino acid sequence of SEQ ID NO:216. In certain embodiments of the pharmaceutical formulation or the method, the first antibody Fc domain peptide comprises the amino acid sequence of SEQ ID NO:290 and the second antibody Fc domain peptide comprises the amino acid sequence of SEQ ID NO:291.

[0042] In another aspect, provided herein is a kit comprising one or more vessels comprising a pharmaceutical formulation, wherein the pharmaceutical formulation comprises a heterodimeric Fc-fused protein comprising a first Fc region and a second Fc region of an immunoglobulin Fc (fragment crystallizable) pair and the p40 and p35 subunits of IL-12, wherein the p40 and p35 subunits of IL-12 are linked separately to the first Fc region and the second Fc region, or to the second Fc region and the first Fc region, respectively, wherein the p40 and p35 subunits are each linked to the N-terminus or C-terminus of the Fc regions, and wherein CH3 domains of the first Fc region and the second Fc region each comprise one or more mutations promoting heterodimerization; and a pharmaceutically acceptable carrier, and the one or more vessels collectively comprise about 0.1 mg-about 2 mg of heterodimeric Fc-fused protein. In certain embodiments, the one or more vessels collectively comprise about 0.5 mg to about 2 mg of heterodimeric Fc-fused protein. In certain embodiments, the one or more vessels collectively comprise about 1 mg of heterodimeric Fc-fused protein. In certain embodiments, the kit comprises one vessel comprising about 1 mg of heterodimeric Fc-fused protein. In some embodiments, the pharmaceutical formulation is a lyophilized formulation or a liquid formulation. In certain embodiments, the pharmaceutical formulation is a liquid formulation supplied in a volume of 1 mL.

[0043] In another aspect, the present disclosure provides for a use of a heterodimeric Fc-fused protein in the manufacture of a medicament for treating a cancer, wherein the medicament is manufactured in a liquid pharmaceutical formulation comprising about 0.5 g/L to about 1.5 g/L of the heterodimeric Fc-fused protein contained in one or more vessels, wherein the heterodimeric Fc-fused protein comprises a first Fc region and a second Fc region of an immunoglobulin Fc (fragment crystallizable) pair and the p40 and p35 subunits of IL-12, wherein the p40 and p35 subunits of IL-12 are linked separately to the first Fc region and the second Fc region, or to the second Fc region and the first Fc region, respectively, wherein the p40 and p35 subunits are each linked to the N-terminus or C-terminus of the Fc regions, and wherein CH3 domains of the first Fc region and the second Fc region each comprise one or more mutations promoting heterodimerization. In some embodiments, the liquid pharmaceutical formulation comprises about 1.0 g/L of the heterodimeric Fc-fused protein.

[0044] In another aspect, provided herein is a use of a heterodimeric Fc-fused protein in the manufacture of a medicament for treating a cancer, wherein the medicament is manufactured in a liquid pharmaceutical formulation comprising about 0.1 mg-about 2 mg of heterodimeric Fc-fused protein contained in one or more vessels, wherein the heterodimeric Fc-fused protein comprises a first Fc region and a second Fc region of an immunoglobulin Fc (fragment crystallizable) pair and the p40 and p35 subunits of IL-12, wherein the p40 and p35 subunits of IL-12 are linked separately to the first Fc region and the second Fc region, or to the second Fc region and the first Fc region, respectively, wherein the p40 and p35 subunits are each linked to the N-terminus or C-terminus of the Fc regions, and wherein CH3 domains of the first Fc region and the second Fc region each comprise one or more mutations promoting heterodimerization. In some embodiments, the liquid pharmaceutical formulation comprises 1 mg of heterodimeric Fc-fused protein. In some embodiments, the medicament is contained in one vessel. In some embodiments, wherein each vessel contains 1 mg of heterodimeric Fc-fused protein. In certain embodiments, the medicament is administered to the subject on day 1, every 3 weeks. In some embodiments, the medicament is administered to the subject on day 1, every 4 weeks. In some embodiments, the medicament is administered subcutaneously. In some embodiments, the medicament is administered in a volume of about 0.1 mL to about 1 mL. In certain embodiments, the medicament is administered in a volume of about 1 mL. In some embodiments, the medicament is administered to a maximum of two injection sites. In certain embodiments, a second injection is completed within 10 minutes after a first injection. In some embodiments, the medicament is administered at a dose of about 0.05 mg/kg to about 1.75 mg/kg. In certain embodiments, the medicament is administered at a dose of about 1 mg/kg. In some embodiments, the medicament is diluted prior to administration in a solution of 0.9% saline (sodium chloride for injection) and 0.01% polysorbate 80.

[0045] In another aspect, provided herein is a method of manufacturing a heterodimeric Fc-fused protein for the preparation of a pharmaceutical formulation thereof, the method comprising adding acetic acid to a solution comprising the heterodimeric Fc-fused protein obtained from a Chinese Hamster Ovary (CHO) cell culture expressing the heterodimeric Fc-fused protein for 30 minutes to 90 minutes, wherein the acetate adjusts and maintains the pH of the solution at pH 3.55 to 3.75, and wherein the heterodimeric Fc-fused protein comprises a first Fc region and a second Fc region of an immunoglobulin Fc (fragment crystallizable) pair and the p40 and p35 subunits of IL-12, wherein the p40 and p35 subunits of IL-12 are linked separately to the first Fc region and the second Fc region, or to the second Fc region and the first Fc region, respectively, wherein the p40 and p35 subunits are each linked to the N-terminus or C-terminus of the Fc regions, and wherein CH3 domains of the first Fc region and the second Fc region each comprise one or more mutations promoting heterodimerization. In certain embodiments, the acetic acid is added to the solution comprising the heterodimeric Fc-fused protein for about 60 minutes. In certain embodiments, the acetic acid adjusts and maintains the pH of the solution to about 3.65. In certain embodiments, the CHO cell culture expressing the heterodimeric Fc-fused protein is maintained in suspension. In certain embodiments, the CHO cell culture expressing the heterodimeric Fc-fused protein is cultured for 7-21 days in a bioreactor. In certain embodiments, the CHO cell culture expressing the heterodimeric Fc-fused protein is cultured for 14 days in a bioreactor. In some embodiments, the CHO cell culture expressing the heterodimeric Fc-fused protein is harvested by depth filtration to yield a CHO harvest medium. In certain embodiments, the depth filtration is a two-stage single-use depth filtration consisting of DOHC and XOHC filters. In certain embodiments, the heterodimeric Fc-fused protein is purified from the CHO harvest medium using Protein A capture chromatography, mixed mode chromatography, and cation exchange chromatography to yield the solution comprising the heterodimeric Fc-fused protein.

[0046] In some embodiments, the Protein A capture chromatography comprises equilibrating a Protein A resin with 20 mM Tris, 150 mM NaCl at pH 7.5, loading CHO harvest medium onto the Protein A resin; washing the loaded Protein A resin with 20 mM Tris, 150 mM NaCl at pH 7.5; washing the loaded Protein A resin with 50 mM acetate at pH 5.4; and eluting the heterodimeric Fc-fused protein from the Protein A resin with 50 mM acetate, 100 mM arginine at pH 3.7 and collecting by 280 nm UV starting at 1.25 AU/cm ascending and ending at 1.25 AU/cm descending. In certain embodiments, the acetic acid is added at a concentration of 0.5M to the solution comprising the heterodimeric Fc-fused protein eluted from the Protein A resin, wherein the acetic acid acidifies the pH of the solution to pH 3.65 for 60 minutes, followed by neutralization of the solution to pH 5.2 by adding 2M Tris. In certain embodiments, following acidification and neutralization of the solution, the solution comprising the heterodimeric Fc-fused protein is passed through a 0.2 μm filter. In certain embodiments, the filtered solution comprising the heterodimeric Fc-fused protein eluted from the Protein A resin is passed through X0SP depth filtration.

[0047] In some embodiments, mixed mode chromatography comprises equilibrating a mixed mode chromatography column with 50 mM acetate at pH 5.2; loading the solution passed through X0SP filtration onto the mixed mode chromatography column; washing the loaded mixed mode chromatography column with 50 mM acetate at pH 5.2; and eluting the heterodimeric Fc-fused protein from the mixed mode chromatography column with 50 mM Acetate, 250 mM NaCl at pH 5.2 and collecting by 280 nm UV starting at 0.625 AU/cm ascending and ending at 1.50 AU/cm descending. In certain embodiments, the solution comprising the heterodimeric Fc-fused protein eluted from the mixed mode chromatography column is passed through a 0.2 μm filter.

[0048] In some embodiments, cation exchange chromatography comprises equilibrating a cation exchange chromatography resin with 50 mM Tris at pH 7.4; loading the filtered solution eluted from the mixed mode chromatography column onto the cation exchange chromatography resin; washing the loaded cation exchange chromatography resin with 50 mM Tris at pH 7.4; and eluting the heterodimeric Fc-fused protein from the cationic exchange chromatography resin with a gradient of 50 mM Tris at pH 7.4 and 50 mM Tris, 0.5 M NaCl at pH 7.4, and collecting by 280 nm UV starting at 2.5 AU/cm ascending and ending at 4.5 AU/cm descending. In certain embodiments, the solution comprising the heterodimeric Fc-fused protein eluted from the cation exchange chromatography resin is passed through a 0.2 μm filter. In certain embodiments, the filtered solution comprising the heterodimeric Fc-fused protein eluted from the cation exchange chromatography resin is nanofiltrated through a prefilter, a 20 nm nominal filter, and a 0.2 μm membrane.

[0049] In some embodiments, the nanofiltrated solution comprising the heterodimeric Fc-fused protein is ultrafiltrated and diafiltrated, wherein ultrafilitration and diafiltration comprises equilibrating an ultrafiltration system with 50 mM Tris, 265 mM NaCl at pH 7.4; concentrating the nanofiltrated solution comprising the heterodimeric Fc-fused protein to a concentration of about 5.0 g/L; exchanging the buffer using 7 diavolumes of 20 mM citrate at pH 6.5; concentration the diafiltrated solution comprising the heterodimeric Fc-fused protein to a concentration of about 11.0 g/L; diluting the concentration solution comprising the heterodimeric Fc-fused protein to a concentration of about 5 g/L to about 10 g/L with 20 mM citrate at pH 6.5; and adding 20 mM citrate, 18% (w/v) sucrose, 3% (w/v) mannitol, 0.03% (w/v) polysorbate-80 at pH 6.5 to achieve a final concentration of the ultrafitration/diafiltration retentate solution comprising the heterodimeric Fc-fused protein of 20 mM citrate, 6% (w/v) sucrose, 1% (w/v) mannitol, 0.01% (w/v) polysorbate-80. In certain embodiments, the ultrafiltrated/diafiltrated solution comprising the heterodimeric Fc-fused protein is passed through a 0.2 μm membrane to yield a bulk drug substance.

[0050] In some embodiments, the bulk drug substance is diluted to an 80% drug product solution in a 0.2 μm filtered buffer comprising 20 mM citrate, 6% (w/v) sucrose, 1% (w/v) mannitol, and 0.01% (w/v) polysorbate-80 at pH 6.5. In certain embodiments, the bulk drug substance or 80% drug product is diluted to a concentration for administration of 1 mg/mL of the heterodimeric Fc-fused protein in a 0.2 μm filtered buffer comprising 20 mM citrate, 6% (w/v) sucrose, 1% (w/v) mannitol, and 0.01% (w/v) polysorbate-80 at pH 6.5.

[0051] A method of treating cancer in a subject who has received treatment with a checkpoint inhibitor antibody for at least 6 weeks, the method comprising administering a pharmaceutical formulation comprising a heterodimeric Fc-fused protein and a pharmaceutically acceptable carrier to the subject, wherein the heterodimeric Fc-fused protein comprises a first Fc region and a second Fc region of an immunoglobulin Fc (fragment crystallizable) pair and the p40 and p35 subunits of IL-12, wherein the p40 and p35 subunits of IL-12 are linked separately to the first Fc region and the second Fc region, or to the second Fc region and the first Fc region, respectively, wherein the p40 and p35 subunits are each linked to the N-terminus or C-terminus of the Fc regions, and wherein CH3 domains of the first Fc region and the second Fc region each comprise one or more mutations promoting heterodimerization. In certain embodiments, the checkpoint inhibitor antibody is an anti-programmed cell death protein 1 (PD-1) antibody. In certain embodiments, the cancer is melanoma. In certain embodiments, the melanoma is unresectable or metastatic. In certain embodiments, the subject is confirmed to have progressive disease at least 4 weeks after the initial diagnosis of progressive disease while receiving the anti-PD-1 antibody. In certain embodiments, the subject is confirmed to have progressive disease at least 4 weeks after the initial diagnosis of progressive disease while receiving the anti-PD-1 antibody. In certain embodiments, the progressive disease is confirmed by radiological or clinical observation.

[0052] In another aspect, provided herein is a method of treating cancer in a subject who has received treatment with a checkpoint inhibitor antibody or an anti-vascular endothelial growth factor therapy as a monotherapy, or in combination, the method comprising administering a pharmaceutical formulation comprising a heterodimeric Fc-fused protein and a pharmaceutically acceptable carrier to the subject, wherein the heterodimeric Fc-fused protein comprises a first Fc region and a second Fc region of an immunoglobulin Fc (fragment crystallizable) pair and the p40 and p35 subunits of IL-12, wherein the p40 and p35 subunits of IL-12 are linked separately to the first Fc region and the second Fc region, or to the second Fc region and the first Fc region, respectively, wherein the p40 and p35 subunits are each linked to the N-terminus or C-terminus of the Fc regions, and wherein CH3 domains of the first Fc region and the second Fc region each comprise one or more mutations promoting heterodimerization. In certain embodiments, the checkpoint inhibitor antibody is an anti-PD-1 antibody or an anti-PD-L1 antibody.

[0053] In certain embodiments, the cancer is advanced renal cell carcinoma (RCC). In certain embodiments, the RCC is unresectable or metastatic. In certain embodiments, the RCC has a clear cell component. In certain embodiments, the subject received no more than 3 previous lines of therapy. In certain embodiments, the subject has not received treatment with a checkpoint inhibitor. In certain embodiments, the checkpoint inhibitor comprises an anti-PD-1 antibody or anti-PD-L1 antibody as a monotherapy or in combination with a platinum based chemotherapy.

[0054] In another aspect, provided herein is a method of treating cancer in a subject who has received treatment with only one platinum-containing regimen, the method comprising administering a pharmaceutical formulation comprising a heterodimeric Fc-fused protein and a pharmaceutically acceptable carrier to the subject, wherein the heterodimeric Fc-fused protein comprises a first Fc region and a second Fc region of an immunoglobulin Fc (fragment crystallizable) pair and the p40 and p35 subunits of IL-12, wherein the p40 and p35 subunits of IL-12 are linked separately to the first Fc region and the second Fc region, or to the second Fc region and the first Fc region, respectively, wherein the p40 and p35 subunits are each linked to the N-terminus or C-terminus of the Fc regions, and wherein CH3 domains of the first Fc region and the second Fc region each comprise one or more mutations promoting heterodimerization. In certain embodiments, the platinum containing regimen is platinum in combination with an agent selected from gemcitabine, methotrexate, vinblastine, and doxorubicin. In certain embodiments, the cancer is locally advanced or metastatic transitional cell urothelial carcinoma. In certain embodiments, the urothelial carcinoma includes one or more of the group consisting of the renal pelvis, ureters, urinary urothelium, and urethra. In certain embodiments, the urothelial carcinoma is inoperable. In certain embodiments, the urothelial carcinoma is characterized with radiographic progression or with recurrence within 6 months after the last administration of a platinum-containing regimen as an adjuvant.

[0055] In some embodiments, the urothelial carcinoma is considered failure of a first-line, platinum-containing regimen. In certain embodiments, the subject has received no more than 2 lines of therapy (including the platinum-containing regimen) for the treatment of the urothelial carcinoma prior to administration of the pharmaceutical formulation. In certain embodiments, the subject has not received treatment with a checkpoint inhibitor (CPI) as a first-line therapy. In certain embodiments, the checkpoint inhibitor is an anti-PD-1 antibody or anti-PD-L1 antibody. In certain embodiments, the checkpoint inhibitor is a monotherapy or in combination with a platinum based chemotherapy.

[0056] In some embodiments, the pharmaceutical formulation is administered in combination with pembrolizumab. In certain embodiments, pembrolizumab is administered once every 3 weeks. In certain embodiments, pembrolizumab is administered before administration of the pharmaceutical formulation. In certain embodiments, the pharmaceutical formulation is administered within one hour after the completion of administration of pembrolizumab. In some embodiments, pembrolizumab is administered at a dose of 200 mg. In some embodiments, pembrolizumab is administered intravenously. In some embodiments, the combination is for treatment of a cancer selected from the group consisting of: melanoma, non-small cell lung cancer (NSCLC), small cell lung cancer (SCLC), head and neck squamous cell carcinoma (HNSCC), classical Hodgkin lymphoma, primary mediastinal large B-cell lymphoma, urothelial carcinoma, microsatellite instability-high cancer, gastric cancer, oesophageal cancer, cervical cancer, hepatocellular carcinoma, Merkel cell carcinoma, renal cell carcinoma, and endometrial carcinoma. In some embodiments, the combination is for treatment of a cancer selected from the group consisting of: melanoma, non-small cell lung cancer (NSCLC), small cell lung cancer (SCLC), head and neck squamous cell carcinoma (HNSCC), classical Hodgkin lymphoma, primary mediastinal large B-cell lymphoma, urothelial carcinoma, microsatellite instability-high cancer, gastric cancer, oesophageal cancer, cervical cancer, ovarian cancer, prostate cancer, hepatocellular carcinoma, Merkel cell carcinoma, renal cell carcinoma, and endometrial carcinoma.

[0057] In some embodiments, the pharmaceutical formulation is administered in combination with nivolumab. In certain embodiments, nivolumab is administered once every 4 weeks. In some embodiments, the nivolumab is administered before administration of the pharmaceutical formulation. In some embodiments, the pharmaceutical formulation is administered within one hour after the completion of administration of nivolumab. In some embodiments, the nivolumab is administered at a dose of about 480 mg. In some embodiments, the nivolumab is administered intravenously. In some embodiments the combination is for treatment of a cancer selected from the group consisting of: melanoma, non-small cell lung cancer (NSCLC), small cell lung cancer (SCLC), renal cell carcinoma, classical Hodgkin lymphoma, head and neck squamous cell carcinoma (HNSCC), colorectal cancer, hepatocellular carcinoma, bladder cancer, and oesophageal cancer. In some embodiments the combination is for treatment of a cancer selected from the group consisting of: melanoma, non-small cell lung cancer (NSCLC), small cell lung cancer (SCLC), renal cell carcinoma, classical Hodgkin lymphoma, head and neck squamous cell carcinoma (HNSCC), colorectal cancer, hepatocellular carcinoma, bladder cancer, oesophageal cancer, gastric cancer, ovarian cancer, and prostate cancer. In some embodiments, the cancer is melanoma. In certain embodiments, the melanoma is unresectable or metastatic. In some embodiments the cancer is colorectal cancer. In certain embodiments, the colorectal cancer is microsatellite instability-high (MSI-H) or mismatch repair deficient (dMMR) metastatic colorectal cancer.

[0058] In some embodiments, the pharmaceutical formulation is administered to the subject on day 1, every 3 weeks. In some embodiments, the pharmaceutical formulation is administered to the subject on day 1, every 4 weeks. In some embodiments, the pharmaceutical formulation is administered subcutaneously. In some embodiments, the pharmaceutical formulation is administered in a volume of about 0.1 mL to about 1 mL. In some embodiments, the pharmaceutical formulation is administered in a volume of about 1 mL. In some embodiments, the pharmaceutical formulation is administered to a maximum of two injection sites. In certain embodiments, a second injection is completed within 10 minutes after a first injection.

[0059] In some embodiments, the pharmaceutical formulation is administered at a dose of about 0.05 mg/kg to about 1.75 mg/kg. In certain embodiments, the pharmaceutical formulation is administered at a dose of about 1 mg/kg. In some embodiments, the pharmaceutical formulation is diluted prior to administration in a solution of 0.9% saline (sodium chloride for injection) and 0.01% polysorbate 80.

[0060] In some embodiments, the presence of the cancer is determined using the Response Evaluation Criteria for Solid Tumors (RECIST), version 1.1. In some embodiments, a subject who has a confirmed complete response is treated with the pharmaceutical formulation for at least 12 months after confirmation unless a criterion for discontinuation is met.

[0061] In another aspect, provided herein is a method of treating a subject whose blood concentration of C-reactive protein (CRP) is monitored, the method comprising administering to the subject a pharmaceutical formulation comprising a heterodimeric Fc-fused protein and a pharmaceutically acceptable carrier, wherein the heterodimeric Fc-fused protein comprises a first Fc region and a second Fc region of an immunoglobulin Fc (fragment crystallizable) pair and the p40 and p35 subunits of IL-12, wherein the p40 and p35 subunits of IL-12 are linked separately to the first Fc region and the second Fc region, or to the second Fc region and the first Fc region, respectively, wherein the p40 and p35 subunits are each linked to the N-terminus or C-terminus of the Fc regions, and wherein CH3 domains of the first Fc region and the second Fc region each comprise one or more mutations promoting heterodimerization. In some embodiments, if the CRP concentration in the subject's blood is higher than a threshold CRP concentration, then the subject is identified as being at risk for developing an adverse drug reaction; and if the CRP concentration in the subject's blood is about the same or lower than the threshold C-reactive protein concentration, the subject is not identified as being at risk for developing an adverse drug reaction. In some embodiments, if the CRP concentration in the subject's blood is higher than the threshold CRP concentration, then (1) the administration of the pharmaceutical formulation is paused; (2) the heterodimeric Fc-fused protein is administered at a lower dose; or (3) a remedial action is taken to reduce or alleviate the formulation's toxicity effects in the subject.

[0062] In another aspect, provided herein is a method of treating cancer in a subject in need thereof, the method comprising subcutaneous administration of a pharmaceutical formulation comprising a heterodimeric Fc-fused protein and pharmaceutically acceptable carrier to the subject, wherein the heterodimeric Fc-fused protein comprises a first Fc region and a second Fc region of an immunoglobulin Fc (fragment crystallizable) pair and the p40 and p35 subunits of IL-12, wherein the p40 and p35 subunits of IL-12 are linked separately to the first Fc region and the second Fc region, or to the second Fc region and the first Fc region, respectively, wherein the p40 and p35 subunits are each linked to the N-terminus or C-terminus of the Fc regions, and wherein CH3 domains of the first Fc region and the second Fc region each comprise one or more mutations promoting heterodimerization; and the pharmaceutical formulation comprises citrate; a sugar; a sugar alcohol; and a non-ionic surfactant, and the pH of the formulation is between 5.5 and 7.0.

[0063] In some embodiments of the kit, the use, or the method provided herein, the first Fc region and second Fc region of the heterodimeric Fc-fused protein are human IgG1 Fc regions. In some embodiments, the human IgG1 Fc regions comprise one or more mutation(s) that reduce(s) an effector function of an Fc. In some embodiments of the kit, the use, or the method provided herein, the first Fc region and second Fc region comprise one or more mutation(s) selected from L234A, L235A or L235E, G237A, P329A, A330S, and P331S, numbered according to the EU numbering system. In some embodiments, the first Fc region and second Fc region each comprise mutations L234A, L235A, and P329A.

[0064] In certain embodiments of the kit, the use, or the method provided herein, the p40 subunit of IL12 comprises the amino acid sequence of SEQ ID NO: 127 and the p35 subunit of IL-12 comprises the amino acid sequence of SEQ ID NO: 128. In certain embodiments of the kit, the use, or the method provided herein, the p35 subunit of IL-12 is fused to the second Fc region by a linker comprising the amino acid sequence of SEQ ID NO: 108. In some embodiments, the first Fc region comprises mutations L234A, L235A, P329A, Y349C, K360E, and K409W, and the second Fc region comprises mutations L234A, L235A, P329A, Q347R, S354C, D399V, and F405T. In certain embodiments, the first Fc region comprises the amino acid sequence of SEQ ID NO:215, and the second Fc region comprises the amino acid sequence of SEQ ID NO:216. In some embodiments, the first Fc region linked to the p40 subunit of IL12 comprises the amino acid sequence of SEQ ID NO:290 and the second Fc region linked to the p35 subunit of IL-12 comprises the amino acid sequence of SEQ ID NO:291.

[0065] In some embodiments of the kit, the use, or the method provided herein, the pharmaceutical formulation comprises: (a) citrate; (b) a sugar; (c) a sugar alcohol; and (d) a non-ionic surfactant, further wherein the pH of the formulation is between about 6.0 and about 7.0. In some embodiments of the kit, the use, or the method provided herein, the concentration of citrate in the pharmaceutical formulation is about 10 to about 30 mM. In some embodiments, the concentration of citrate in the pharmaceutical formulation is about 20 mM. In some embodiments, the concentration of the sugar in the pharmaceutical formulation is about 3% to about 12% (w/v). In some embodiments, the concentration of the sugar in the pharmaceutical formulation is about 6% (w/v). In some embodiments, the sugar is a disaccharide. In some embodiments, the disaccharide is sucrose. In some embodiments, the concentration of the sugar alcohol in the pharmaceutical formulation is between about 0.5% to about 6% (w/v). In some embodiments, the concentration of the sugar alcohol in the pharmaceutical formulation is about 1% (w/v). In some embodiments, the sugar alcohol is derived from a monosaccharide. In some embodiments, the sugar alcohol is mannitol.

[0066] In some embodiments of the kit, the use, or the method provided herein, the concentration of the non-ionic surfactant in the pharmaceutical formulation is between about 0.005% to about 0.02% (w/v). In some embodiments of the kit, the use, or the method provided herein, the concentration of polysorbate 80 in the pharmaceutical formulation is about 0.01% (w/v). In some embodiments, the non-ionic surfactant is a polysorbate. In some embodiments of the kit, the use, or the method provided herein, the polysorbate is polysorbate 80. In some embodiments, the pH is between about 6.1 and about 6.9. In some embodiments, the pH is between about 6.2 and about 6.8. In some embodiments, the pH is between about 6.3 and about 6.7. In some embodiments, the pH is between about 6.4 and about 6.6. In some embodiments of the kit, the use, or the method provided herein, the pH is about 6.5.

[0067] In some embodiments of the kit, the use, or the method provided herein, the pharmaceutical formulation further comprises water. In some embodiments of the kit, the use, or the method provided herein, the water is Water for Injection, USP.

[0068] In some embodiments of the kit, the use, or the method provided herein, the pharmaceutical formulation comprises a bulk concentration of heterodimeric Fc-fused protein of about 1 g/L to about 10 g/L. In some embodiments, the pharmaceutical formulation comprises a bulk concentration of heterodimeric Fc-fused protein of about 2 g/L to about 8 g/L. In some embodiments, the pharmaceutical formulation comprises a bulk concentration of heterodimeric Fc-fused protein of about 4 g/L to about 6 g/L. In some embodiments, the pharmaceutical formulation comprises a bulk concentration of heterodimeric Fc-fused protein of about 5 g/L. In some embodiments, the pharmaceutical formulation comprises a concentration of the protein for administration of about 0.5 g/L to about 1.5 g/L. In some embodiments, the pharmaceutical formulation comprises a concentration of the protein for administration of about 0.75 g/L to about 1.25 g/L. In some embodiments, the pharmaceutical formulation comprises a concentration of the protein for administration of about 1 g/L.

[0069] In some embodiments of the kit, the use, or the method provided herein, the pharmaceutical formulation is designed to be stored at a temperature between 2° C. and 8° C. In some embodiments, the pharmaceutical formulation is a clear, colorless solution and free of visible particulates.

[0070] In some embodiments of the kit, the use, or the method provided herein, the pharmaceutical formulation has a thermal stability profile as defined by a Tₘ₁ of greater than about 60° C., greater than about 61° C., greater than about 62° C., greater than about 63° C., greater than about 64° C., greater than about 65° C., or greater than about 66° C.; and/or a Tₘ₂ of greater than about 70° C., greater than about 71° C., greater than about 72° C., greater than about 73° C., greater than about 74° C., greater than about 75° C., greater than about 76° C., or greater than about 77° C., as measured by differential scanning fluorimetry. In some embodiments, the formulation has a thermal stability profile as defined by a Tₘ₁ of about 67.0° C. and a Tₘ₂ of about 77.3° C.

[0071] In some embodiments of the kit, the use, or the method provided herein, the thermal stability profile of the pharmaceutical formulation, as defined by Tₘ₁ and/or Tₘ₂ is changed by less than about 2° C. or less than about 1° C. when the pharmaceutical formulation is incubated for 1 week at 50° C., as compared to the same pharmaceutical formulation that is incubated for 1 week at 5° C., as measured by differential scanning fluorimetry. In some embodiments, the formulation has a thermal stability profile as defined by a T_{agg} of greater than 60° C., greater than about 61° C., greater than about 62° C., greater than about 63° C., greater than about 64° C., greater than about 65° C., greater than about 66° C., or greater than about 67° C., as measured by differential scanning fluorimetry. In some embodiments, the thermal stability profile of the pharmaceutical formulation, as defined by T_{agg} is changed by less than about 2° C. or less than about 1° C. when the pharmaceutical formulation is incubated for 1 week at 50° C., as compared to the same pharmaceutical formulation that is incubated for 1 week at 5° C., as measured by differential scanning fluorimetry.

[0072] In some embodiments of the kit, the use, or the method provided herein, the pH of the pharmaceutical formulation does not change by more than about 0.2 or about 0.1 in pH value after the pharmaceutical formulation is incubated for 1 week at 5° C. In some embodiments, the pH of the pharmaceutical formulation does not change by more than about 0.2 or about 0.1 in pH value after the pharmaceutical formulation is incubated for 1 week at 50° C.

[0073] In some embodiments of the kit, the use, or the method provided herein, the heterodimeric Fc-fused protein in the pharmaceutical formulation has a Z-average hydrodynamic diameter of less than about 15 nm, less than about 14 nm, less than about 13 nm, or less than about 12 nm, as measured by dynamic light scattering at 25° C. In some embodiments, the heterodimeric Fc-fused protein in the pharmaceutical formulation has a Z-average hydrodynamic diameter of about 11.6 nm.

[0074] In some embodiments of the kit, the use, or the method provided herein, the heterodimeric Fc-fused protein in the pharmaceutical formulation has a Z-average hydrodynamic diameter of less than about 20 nm, less than about 19 nm, less than about 18 nm, less than about 17 nm, less than about 16 nm, or less than about 15 nm, as measured by dynamic light scattering at 25° C., after the pharmaceutical formulation is incubated for 2 weeks at 50° C. In some embodiments, the heterodimeric Fc-fused protein in the pharmaceutical formulation has a Z-average hydrodynamic diameter of about 14.4 nm.

[0075] In some embodiments of the kit, the use, or the method provided herein, the heterodimeric Fc-fused protein in the pharmaceutical formulation has a Z-average hydrodynamic diameter of less than about 20 nm, less than about 19 nm, less than about 18 nm, less than about 17 nm, or less than about 16 nm, as measured by dynamic light scattering at 25° C., after the pharmaceutical formulation is subjected to five freeze thaw cycles. In some embodiments, the heterodimeric Fc-fused protein in the pharmaceutical formulation has a Z-average hydrodynamic diameter of about 15.3 nm.

[0076] In some embodiments of the kit, the use, or the method provided herein, the polydispersity index of the heterodimeric Fc-fused protein in the pharmaceutical formulation is less than about 0.30, less than about 0.29, less than about 0.28, or less than about 0.27, as measured by dynamic light scattering at 25° C. In some embodiments, the polydispersity index of the heterodimeric Fc-fused protein in the pharmaceutical formulation is about 0.26.

[0077] In some embodiments of the kit, the use, or the method provided herein, the polydispersity index of the heterodimeric Fc-fused protein in the pharmaceutical formulation is less than about 0.30, less than about 0.29, less than about 0.28, less than about 0.27, or less than about 0.26, as measured by dynamic light scattering at 25° C., after the pharmaceutical formulation is incubated for 2 weeks at 50° C. In some embodiments, the polydispersity index of the heterodimeric Fc-fused protein in the pharmaceutical formulation is about 0.25.

[0078] In some embodiments of the kit, the use, or the method provided herein, the polydispersity index of the heterodimeric Fc-fused protein in the pharmaceutical formulation is less than about 0.40, less than about 0.35, or less than about 0.34, as measured by dynamic light scattering at 25° C., after the pharmaceutical formulation is subjected to five freeze thaw cycles. In some embodiments, the polydispersity index of the heterodimeric Fc-fused protein in the pharmaceutical formulation is about 0.33.

[0079] In some embodiments of the kit, the use, or the method provided herein, the purity profile of the pharmaceutical formulation, as measured by the area of the main peak as a percentage of total detected area in a SEC-HPLC analysis, is greater than about 90%, greater than about 91%, greater than about 92%, greater than about 93%, greater than about 94%, greater than about 95%, greater than about 96%, greater than about 97%, greater than about 98%, or greater than about 99%. In some embodiments, the purity profile of the pharmaceutical formulation, as measured by the area of the main peak as a percentage of total detected area in a SEC-THPLC analysis, is about 99.0%. In some embodiments, the purity profile of the pharmaceutical formulation, as measured by the area of the main peak as a percentage of total detected area in a SEC-THPLC analysis, is greater than about 75%, greater than about 80%, greater than about 81%, greater than about 82%, greater than about 83%, greater than about 84%, or greater than about 85%, after the pharmaceutical formulation is incubated for 2 weeks at 50° C. In some embodiments, the purity profile of the pharmaceutical formulation, as measured by the area of the main peak as a percentage of total detected area in a SEC-HPLC analysis, is about 85.2%.

[0080] In some embodiments of the kit, the use, or the method provided herein, the purity profile of the pharmaceutical formulation, as measured by the area of the main peak as a percentage of total detected area in a SEC-HPLC analysis, is greater than about 90%, greater than about 91%, greater than about 92%, greater than about 93%, greater than about 94%, greater than about 95%, greater than about 96%, greater than about 97%, or greater than about 98%, after the pharmaceutical formulation is subjected to five freeze thaw cycles. In some embodiments, wherein the purity profile of the pharmaceutical formulation, as measured by the area of the main peak as a percentage of total detected area in a SEC-HPLC analysis, is about 98.9%.

[0081] In summary, the present invention provides heterodimeric Fc-fused protein constructs of multisubunit proteins. These fusion protein constructs can exhibit a higher serum half-life compared to a native/natural multisubunit protein, improved yield during production, enhanced stability during storage, and/or improved efficacy when used as a therapeutic.

### BRIEF DESCRIPTION OF THE DRAWINGS

[0082] FIGS. 1A-1D illustrate various features of an exemplary heterodimeric Fc-fused protein comprising a first subunit of a multisubunit protein connected by a linker to a first antibody Fc domain polypeptide, and a second, different subunit of a multisubunit protein connected by another linker to a second antibody Fc domain polypeptide, in which the subunits are connected by two disulfide bonds. FIG. 1A shows a general schematic diagram showing the different components of an exemplary heterodimeric Fc-fused protein. FIG. 1B shows an exemplary heterodimeric Fc-fused protein which includes IL12 subunits p40 and p35, linkers, and Fc domains with mutations. FIG. 1C shows a schematic diagram illustrating exemplary mutations that can be present in the heterodimeric Fc-fused protein of FIG. 1A or FIG. 1B. FIG. 1D shows a schematic diagram illustrating exemplary disulfide bonds that can form in the heterodimeric Fc-fused protein of FIG. 1A, FIG. 1B, or FIG. 1C.

[0083] FIGS. 2A-2C are graphs showing tumor growth curves of individual mice inoculated with CT26 tumor cells and treated with recombinant mouse IL-12 (rmIL-12) (FIG. 2A), DF-mIL-12-Fc wt (FIG. 2B), DF-mIL-12-Fc si (FIG. 2C), or mIgG2a isotype control once a week.

[0084] FIG. 3 is a graph showing Kaplan-Meier survival curves of mice inoculated with CT26 tumor cells and treated with rmIL-12, DF-mIL-12-Fc wt, DF-mIL-12-Fc si, or mIgG2a isotype control once a week.

[0085] FIGS. 4A-4D are graphs showing tumor growth curves of individual mice inoculated with CT26 tumor cells and treated with DF-mIL-12-Fc wt at a molar equivalent of 1 μg rmIL-12 (FIG. 4A), DF-mIL-12-Fc si at a molar equivalent of 1 μg rmIL-12 (FIG. 4B), DF-mIL-12-Fc wt at a molar equivalent of 0.1 μg rmIL-12 (FIG. 4C), DF-mIL-12-Fc si at a molar equivalent of 0.1 μg rmIL-12 (FIG. 4D), or mIgG2a isotype control once a week.

[0086] FIG. 5 is a graph showing Kaplan-Meier survival curves of mice inoculated with CT26 tumor cells and treated with DF-mIL-12-Fc wt at a molar equivalent of 1 μg rmIL-12, DF-mIL-12-Fc si at a molar equivalent of 1 μg rmIL-12, DF-mIL-12-Fc wt at a molar equivalent of 0.1 μg rmIL-12, DF-mIL-12-Fc si at a molar equivalent of 0.1 μg rmIL-12, or mIgG2a isotype control once a week.

[0087] FIGS. 6A-6C are graphs showing tumor growth curves of individual mice inoculated with B16F10 melanoma cells and treated with rmIL-12 (FIG. 6A), DF-mIL-12-Fc wt (FIG. 6B), DF-mIL-12-Fc si (FIG. 6C), or mIgG2a isotype control once a week.

[0088] FIG. 7 is a graph showing Kaplan-Meier survival curves of mice inoculated with B16F10 melanoma cells and treated with rmIL-12, DF-mIL-12-Fc wt, DF-mIL-12-Fc si, or mIgG2a isotype control once a week.

[0089] FIGS. 8A-8D are graphs showing tumor growth curves of individual mice inoculated with B16F10 melanoma cells and treated with DF-mIL-12-Fc wt at a molar equivalent of 0.5 μg rmIL-12 (FIG. 8A), DF-mIL-12-Fc si at a molar equivalent of 0.5 μg rmIL-12 (FIG. 8B), DF-mIL-12-Fc wt at a molar equivalent of 0.1 μg rmIL-12 (FIG. 8C), DF-mIL-12-Fc si at a molar equivalent of 0.1 μg rmIL-12 (FIG. 8D), or mIgG2a isotype control once a week.

[0090] FIG. 9 is a graph showing Kaplan-Meier survival curves of mice inoculated with B16F10 melanoma cells and treated with DF-mIL-12-Fc wt at a molar equivalent of 0.5 μg rmIL-12, DF-mIL-12-Fc si at a molar equivalent of 0.5 μg rmIL-12, DF-mIL-12-Fc wt at a molar equivalent of 0.1 μg rmIL-12, DF-mIL-12-Fc si at a molar equivalent of 0.1 μg rmIL-12, or mIgG2a isotype control once a week.

[0091] FIG. 10A is a graph showing IL-12 response to treatment with DF-hIL-12-Fc si (DF IL-12-Fc) or recombinant human IL-12 (rhIL-12) using a HEK-Blue IL-12 reporter assay.

[0092] FIG. 10B is a graph showing IFNγ production by peripheral blood mononuclear cells (PBMCs) in response to treatment with DF-hIL-12-Fc si (DF IL-12-Fc) and rhIL-12.

[0093] FIG. 11 is a graph showing the relative plasma concentrations of DF-hIL-12-Fc si, rhIL-12, and IFNγ in cynomolgus monkey K2 EDTA plasma following a single intravenous dose of equimolar amounts of DF-hIL-12-Fc si or wild type rhIL-12 at 10 μg/kg.

[0094] FIGS. 12A-12B are graphs showing the PK/PD profile of rmIL-12 (FIG. 12A) and DF-mIL-12-Fc si (FIG. 12B) in naïve Balb/c mice. FIG. 12A shows the PK/PD profile of rmIL-12 in naïve Balb/c mice and FIG. 12B shows the PK/PD profile of DF-mIL-12-Fc si in naïve Balb/c miceIL-12. IL-12 and IFNγ levels in serum were analyzed by ELISA. FIG. 12C is a graph showing the PK/PD profile of DF-mIL-12-Fc si administered intravenously in naïve Balb/c mice. FIG. 12D is a graph showing the PK/PD profile of DF-mIL-12-Fc si administered intraperitoneally in naïve Balb/c mice. FIG. 12E is a graph showing the PK/PD profile of DF-mIL-12-Fc si administered subcutaneously in naïve Balb/c mice. Average serum levels represent the mean±SEM.

[0095] FIGS. 13A-13C are graphs showing tumor growth curves of B16F10 tumor-bearing mice treated with DF-mIL-12-Fc si, anti-PD-1, or a combination thereof. Mice were treated intraperitoneally with 0.5 μg isotype control or 0.5 μg DF-mIL-12-Fc si (FIG. 13A), isotype control or anti-PD-1 (FIG. 13B), and isotype control or DF-mIL-12-Fc si/anti-PD-1 (FIG. 13C). Animals were injected once a week with DF-mIL-12-Fc si and twice weekly with anti-PD-1 as indicated above. Tumor growth was assessed for 60 days. Graphs show tumor growth curves of individual mice.

[0096] FIGS. 14A-14B are graphs showing survival and body weights of B16F10 tumor-bearing mice treated DF-mIL-12-Fc si, anti-PD-1, or a combination thereof. Mice were treated with isotype, DF-mIL-12-Fc si, anti-PD-1 or in combination of DF-mIL-12-Fc si and anti-PD-1. Animals were injected once a week with 0.5 μg DF-mIL-12-Fc si and twice weekly with 200 μg anti-PD-1 or isotype. FIG. 14A shows Kaplan-Meier survival curves. FIG. 14B shows body weights of mice as averages±standard deviation.

[0097] FIGS. 15A-15C are graphs showing tumor growth curves of B16F10 tumor-bearing mice treated DF-mIL-12-Fc si, mcFAE-C26.99 TriNKETs, or a combination thereof. Mice were treated intraperitoneally with 150 μg isotype control or 0.5 μg DF-mIL-12-Fc si (FIG. 15A), isotype control or 150 μg TriNKET (FIG. 15B), and isotype control or DF-mIL-12-Fc si/TriNKET (FIG. 15C). Animals were injected once a week with DF-mIL-12-Fc si and thrice weekly with TriNKET as indicated above. Tumor growth was assessed for 72 days. Graphs show tumor growth curves of individual mice.

[0098] FIGS. 16A-16B are graphs showing survival and body weights of B16F10 tumor-bearing mice treated with DF-mIL-12-Fc si, mcFAE-C26.99 TriNKETs, or a combination thereof. Mice were treated with isotype, DF-mIL-12-Fc si, TriNKET, or a combination of DF-mIL-12-Fc si and TriNKET. Animals were injected once a week with 0.5 μg DF-mIL-12-Fc si and thrice weekly with 150 μg TriNKET or isotype. FIG. 16A shows Kaplan-Meier survival curves. FIG. 16B shows body weights of mice as averages+standard deviation.

[0099] FIG. 17 is a graph showing tumor growth curves of complete responder (CR) mice from the B16F10 tumor model experiment of FIG. 15 treated with DF-mIL-12-Fc si/TriNKET combination therapy (n=3), re-challenged by engraftment with 2×10⁵ B16F10 melanoma cells.

[0100] FIG. 18A is a graph showing tumor growth curves of individual mice inoculated with CT26 tumor cells and administered a single dose of DF-mIL-12-Fc si or mIgG2a isotype.

[0101] FIG. 18B is a graph showing body weights±standard deviation of mice inoculated with CT26 tumor cells and administered a weekly dose of DF-mIL-12-Fc si, mIgG2a isotype, or rmIL-12.

[0102] FIG. 18C is a graph showing tumor growth curves of re-challenged individual mice that were either naïve or complete responders (CR) when previously administered a single dose of DF-mIL-12-Fc si in a CT26 tumor model.

[0103] FIGS. 19A-19B are graphs showing tumor growth curves of individual mice inoculated with CT26 tumor cells and administered a weekly dose of DF-mIL-12-Fc si or mIgG2a isotype either intraperitoneally (IP)(FIG. 19A) or subcutaneously (SC) (FIG. 19B).

[0104] FIG. 20 is a graph showing tumor growth curves of individual mice inoculated with B16F10 melanoma cells and administered a single dose of DF-mIL-12-Fc si or mIgG2a isotype.

[0105] FIGS. 21A-21B are graphs showing tumor growth curves of individual mice inoculated with B16F10 melanoma cells and administered a weekly dose of DF-mIL-12-Fc si or mIgG2a isotype either intraperitoneally (IP) (FIG. 21A) or subcutaneously (SC) (FIG. 21B).

[0106] FIGS. 22A-22B are graphs showing tumor growth curves of individual mice inoculated with CT26 tumor cells and administered a single dose (FIG. 22A) or once weekly dose (FIG. 22B) of DF-mIL-12-Fc si or mIgG2A isotype intraperitoneally at a molar equivalent of 1 μg of rmIL-12.

[0107] FIGS. 23A-23B are graphs showing tumor growth curves of individual mice inoculated with CT26 tumor cells and administered a once weekly dose of DF-mIL-12-Fc si subcutaneously. FIG. 23A is a graph showing tumor growth curves of individual mice inoculated with CT26-Tyrp1 tumor cells and treated once (weekly) with either 2 μg mIgG2a isotype control or 1 μg DF-mIL-12-Fc si. FIG. 23B is a graph showing tumor growth curves of individual mice inoculated with CT26-Tyrp1 tumor cells and treated once (weekly) with either 2 μg mIgG2a isotype control or 2 μg DF-mIL-12-Fc si.

[0108] FIGS. 24A-24C are graphs showing IFNγ (FIG. 24A), CXCL9 (FIG. 24B), and CXCL10 (FIG. 24C) levels in blood (left) and tumor (right) samples at 72 hours following a single dose of DF-mIL-12-Fc si in C57BL/6 mice bearing B16F10 tumors.

[0109] FIGS. 25A-25C are line graphs showing pharmacokinetics of DF-hIL-12-Fc si in cynomolgus monkeys treated with a single subcutaneous dose of 1 μg/kg (FIG. 25A), 2 μg/kg (FIG. 25B), or 4 μg/kg (FIG. 25C) of DF-hIL-12-Fc si. 2240, 2241, 2740, 2741 (FIG. 25A); 3240, 3241, 3740, 3741 (FIG. 25B); 4240, 4241, 4740, 4741 (FIG. 25C) denote individual cynomolgus monkey subjects.

[0110] FIGS. 26A-26F are line graphs showing concentrations of IFNγ and IP10/CXCL10 in cynomolgus monkeys treated with a single subcutaneous dose of DF-hIL-12-Fc si. FIGS. 26A, 26C and 26E show IFNγ concentrations/levels of expression in cynomolgus monkeys treated with 1 μg/kg, 2 μg/kg, and 4 μg/kg of DF-hIL-12-Fc si, respectively. FIGS. 26B, 26D and 26F show IP10/CXCL10 concentrations/levels of expression in cynomolgus monkeys treated with 1 μg/kg, 2 μg/kg, and 4 μg/kg of DF-hIL-12-Fc si, respectively. 1240, 1740, 2240, 2241, 2740, 2741 (FIGS. 26A-26B); 1240, 1740, 3240, 3241, 3740, 3741 (FIGS. 26C, 26D, 26F); 1240, 1740, 4240, 4241, 4740, 4741 (FIG. 26E) denote individual cynomolgus monkey subjects.

[0111] FIG. 27 is a graph showing tumor growth curves of individual mice inoculated with breast cancer cells and administered a weekly dose of a monotherapy (isotype control, DF-mIL-12-Fc si, Doxil® (chemotherapy), or irradiated with 10 Gy) or combination therapy (DF-mIL-12-Fc si in combination with Doxil® or radiation).

[0112] FIG. 28A is a graph showing tumor growth curves of individual mice inoculated with CT26-Tyrp1 tumor cells and treated (bi-weekly) either with isotype control or anti-PD-1 antibody.

[0113] FIG. 28B is a graph showing tumor growth curve of Balb/c mice inoculated with CT26-Tyrp1 tumor cells and treated (bi-weekly) either with isotype control or anti-PD-1 antibody along with weekly treatment of 1 μg of DF-mIL-12-Fc si.

[0114] FIG. 29A is a graph showing tumor growth curves of treated (Tr) tumors in individual mice inoculated with CT26-Tyrp1 tumor cells and intratumorally treated once (weekly) with either isotype control or DF-mIL-12-Fc si. FIG. 29B is a graph showing tumor growth curves of non-treated (NT) CT26-Tyrp1 tumors in the individual mice described in FIG. 29A.

[0115] FIG. 30A is a graph showing tumor growth curves of individual mice inoculated with CT26-Tyrp1 tumor cells and treated once with either 2 μg mIgG2a isotype control or 2 μg DF-mIL-12-Fc si. FIG. 30B is a graph showing average tumor growth curves of individual mice inoculated with CT26-Tyrp1 tumor cells and treated with 2 μg mIgG2a isotype control, 1 μg DF-mIL-12-Fc si (weekly administration), 2 μg DF-mIL-12-Fc si (weekly administration), or 2 μg DF-mIL-12-Fc si (once).

[0116] FIG. 31A is a graph showing IFNγ production of PHA-stimulated PBMCs treated with DF hIL-12-Fc-si having L234A, L235A, and P329A mutations (LALAPA), or L234A, L235A, and P329G mutations (LALAPG). FIG. 31B shows flow cytometry histograms of fluorophore-conjugated hIgG1 binding to THP-1 cells in the presence or absence of DF hIL-12-Fc-si having LALAPA mutations, or LALAPG mutations.

[0117] FIG. 32 is a process flow diagram showing steps for preparing DF hIL-12-Fc si.

[0118] FIG. 33 is a process flow diagram showing steps for preparing a pharmaceutical formulation containing DF-hIL-12-Fc si.

[0119] FIG. 34A is a graph showing Ultraviolet-visible spectroscopy (UV-Vis) calculated concentrations of DF-hIL-12-Fc si in various pharmaceutical formulations containing different buffers. FIG. 34B is a graph showing pH of various pharmaceutical formulations containing DF-IL-12-Fc si.

[0120] FIGS. 35A-35B are photographs of visual appearances of the various formulations of certain pharmaceutical formulations containing DF-hIL-12-Fc si after a 1 week incubation at 5° C. (FIG. 35A) and 50° C. (FIG. 35B).

[0121] FIGS. 36A and 36B are graphs showing the average Tₘ₁ (FIG. 36A) and Tₘ₂ (FIG. 36B) of DF-hIL-12-Fc si in various pharmaceutical formulations after a 1 week incubation at 5° C.

[0122] FIGS. 36C and 36D are graphs showing the average Tₘ₁ (FIG. 36C) and Tₘ₂ (FIG. 36D) of DF-hIL-12-Fc si in various pharmaceutical formulations after a 1 week incubation at 50° C.

[0123] FIGS. 36E-36H are graphs showing representative Differential Scanning Fluorimetry (DSF) melting curves of DF-hIL-12-Fc si in various pharmaceutical formulations after a 1 week incubation at 5° C. (FIGS. 36E-36F) and at 50° C. (FIGS. 36G-36H).

[0124] FIGS. 37A-37B are graphs showing the average T_{agg} of DF-hIL-12-Fc si in various pharmaceutical formulations after a 1 week incubation at at 5° C. (FIG. 37A) and at 50° C. (FIG. 37B).

[0125] FIGS. 37C-37F are graphs showing representative DSF aggregation curves of DF-hIL-12-Fc si in various pharmaceutical formulations after a 1 week incubation at at 5° C. (FIGS. 37C-37D) and at 50° C. (FIGS. 37E-37F).

[0126] FIGS. 38A-38B are graphs showing UV-Vis calculated concentrations of DF-hIL-12-Fc si in various pharmaceutical formulations containing different buffers after a 1 week incubation at 5° C. (FIG. 38A) and at 50° C. (FIG. 38B).

[0127] FIGS. 39A-39B are graphs showing pH of various pharmaceutical formulations containing DF-hIL-12-Fc si after a 1 week incubation at 5° C. (FIG. 39A) and at 50° C. (FIG. 39B).

[0128] FIGS. 40A-40B are graphs showing Z-average hydrodynamic diameter (FIG. 40A) and polydispersity index (FIG. 40B) of DF-hIL-12-Fc si in various pharmaceutical formulations containing different buffers after a 1 week incubation at 5° C. FIGS. 40C-40D are graphs showing average monomer size and average monomer % Pd of DF-hIL-12-Fc si in various pharmaceutical formulations containing different buffers after a 1 week incubation at 5° C.

[0129] FIGS. 40E-40F are graphs showing Z-average hydrodynamic diameter (FIG. 40E) and polydispersity index (FIG. 40F) of DF-hIL-12-Fc si in various pharmaceutical formulations containing different buffers after a 1 week incubation at 50° C. FIGS. 40G-40H are graphs showing average monomer size (FIG. 40G) and average monomer % Pd (FIG. 40H) of DF-hIL-12-Fc si in various pharmaceutical formulations containing different buffers after a 1 week incubation at 50° C.

[0130] FIGS. 401-40J show representative Dynamic Light Scattering (DLS) traces used to calculate the data described in FIGS. 40A-40D. FIGS. 40K-40L shows representative DLS traces used to calculate the data described in FIGS. 40E-40H.

[0131] FIG. 41 is a graph showing % purity of DF-hIL-12-Fc si in various pharmaceutical formulations containing different buffers after a 1 week incubation at 50° C., as measured by Size Exclusion Chromatography High-performance Liquid Chromatography (SEC-HPLC).

[0132] FIG. 42 is a graph showing % purity of DF-hIL-12-Fc si in various pharmaceutical formulations containing different buffers after a 1 week incubation at 50° C., as measured by Capillary Electrophoresis sodium dodecyl sulfate (CE-SDS).

[0133] FIG. 43A is a graph showing UV-Vis calculated concentrations of DF hIL-12-Fc-si at 1 mg/mL in various pharmaceutical formulations containing different buffers and excipients. Referring to FIG. 43A: 1 represents buffer exchange; 2 represents 2-8° C.; 3 represents 50° C.; and 4 reprsents freeze/thaw. FIG. 43B is a graph showing UV-Vis calculated concentrations of DF hIL-12-Fc-si at 10 mg/mL in various pharmaceutical formulations containing different buffers and excipients. Referring to FIG. 43B: 1 represents buffer exchange; 2 represents 2-8° C.; 3. Represents 50° C.; and 4 reprsents freeze/thaw.

[0134] FIGS. 44A-44D are graphs showing the average Tₘ₁ (FIGS. 44A and 44B) and Tₘ₂ (FIGS. 44C and 44D) of DF hIL-12-Fc-si at 1 mg/mL and 10 mg/mL in various pharmaceutical formulations.

[0135] FIGS. 45A-45D show representative DSF melting curves of DF hIL-12-Fc-si in various pharmaceutical formulations.

[0136] FIGS. 46A-46B are graphs showing the average T_{agg} of DF hIL-12-Fc-si at 1 mg/mL (FIG. 46A) and 10 mg/mL (FIG. 46B) in various pharmaceutical formulations.

[0137] FIGS. 46C-46F show representative DSF aggregation curves of DF hIL-12-Fc-si at 1 mg/mL and 10 mg/mL in various pharmaceutical formulations.

[0138] FIG. 47A-47F show representative DLS traces showing size distribution of DF hIL-12-Fc-si at 1 mg/mL and 10 mg/mL in various pharmaceutical formulations that were subjected to different stress conditions.

[0139] FIGS. 48A-48H show Z-average size (FIGS. 48A-48B), polydispersity index (PDI) (FIGS. 48C-48D), monomer size (48E-48F), and monomer % Pd (FIGS. 48G-48H) of DF hIL-12-Fc-si at 1 mg/mL and 10 mg/mL in various pharmaceutical formulations that were subjected to different stress conditions. In FIGS. 48A-48H: 1 represents 2-8° C., 2 represents 50° C., and 3 represents freeze/thaw.

[0140] FIGS. 49A-49D are graphs showing purity of DF hIL-12-Fc-si at 1 mg/mL and 10 mg/mL in various pharmaceutical formulations that were subject to different stress conditions. FIGS. 49A-49B show % main peak after incubation at 50° C. FIGS. 49C-49D show % main peak after incubation at 2-8° C. or freeze-thaw cycle. Referring to FIGS. 49C-49D: 1 represents 2-8° C., and 2 represents freeze/thaw.

[0141] FIGS. 50A-50H are graphs showing particle counts by particle sizes in various pharmaceutical formulations containing DF hIL-12-Fc-si that were subject to different stress conditions, as measured by high accuracy liquid particle (HIAC) analysis. FIG. 50A-50B show counts for ≥2 μm particles, FIGS. 50C-50D show counts for ≥5 m particles, FIGS. 50E-50F show counts for ≥10 m particles, and FIGS. 50G-50H show counts for ≥25 m particles. Referring to FIGS. 50A-50H: 1 represents 2-8° C., 2 represents 50° C., and 3 represents freeze/thaw.

[0142] FIGS. 51A and 51B are schematic diagrams showing study designs for phase 1 and phase 2 where DF hIL-12-Fc-si will be used as a monotherapy (FIG. 51A) and in a combination therapy with Pembrolizumab (FIG. 51B).

[0143] FIGS. 52A and 52B are schematic diagrams showing study designs for phase 1 and phase 2 where DF hIL-12-Fc-si will be used as a monotherapy (FIG. 52A) and in a combination therapy with Nivolumab (FIG. 52B).

### DETAILED DESCRIPTION

[0144] The invention provides improvements on heterodimeric Fc-fused proteins, pharmaceutical formulations comprising such proteins, and therapeutic methods using such proteins and pharmaceutical formulations, including for the treatment of cancer.

[0145] To facilitate an understanding of the present invention, a number of terms and phrases are defined below.

[0146] The terms “a” and “an” as used herein mean “one or more” and include the plural unless the context is inappropriate.

[0147] As used herein, the terms “subject” and “patient” refer to an organism to be treated by the methods and compositions described herein. Such organisms preferably include, but are not limited to, mammals (e.g., murines, simians, equines, bovines, porcines, canines, felines, and the like), and more preferably include humans.

[0148] As used herein, the term “effective amount” refers to the amount of a compound (e.g., a compound of the present invention) sufficient to effect beneficial or desired results (e.g., a desired prophylactic or therapeutic effect). An effective amount can be administered in one or more administration(s), application(s) or dosage(s) and is not intended to be limited to a particular formulation or administration route. As used herein, the term “treating” includes any effect, e.g., lessening, reducing, modulating, ameliorating or eliminating, that results in the improvement of the condition, disease, disorder, and the like, or ameliorating a symptom thereof.

[0149] As used herein, the term “pharmaceutical formulation” refers to the combination of an active agent with a carrier, inert or active, making the composition especially suitable for diagnostic or therapeutic use in vivo or ex vivo.

[0150] As used herein, the term “pharmaceutically acceptable carrier” refers to any of the standard pharmaceutical carriers, such as a phosphate buffered saline solution, water, emulsions (e.g., such as an oil/water or water/oil emulsions), and various types of wetting agents. The compositions also can include stabilizers and preservatives. For examples of carriers, stabilizers and adjuvants, see e.g., Martin, Remington's Pharmaceutical Sciences, 15th Ed., Mack Publ. Co., Easton, Pa. [1975].

[0151] As used herein, the term “pharmaceutically acceptable salt” refers to any pharmaceutically acceptable salt (e.g., acid or base) of a compound of the present invention which, upon administration to a subject, is capable of providing a compound of this invention or an active metabolite or residue thereof. As is known to those of skill in the art, “salts” of the compounds of the present invention may be derived from inorganic or organic acids and bases. Exemplary acids include, but are not limited to, hydrochloric, hydrobromic, sulfuric, nitric, perchloric, fumaric, maleic, phosphoric, glycolic, lactic, salicylic, succinic, toluene-p-sulfonic, tartaric, acetic, citric, methanesulfonic, ethanesulfonic, formic, benzoic, malonic, naphthalene-2-sulfonic, benzenesulfonic acid, and the like. Other acids, such as oxalic, while not in themselves pharmaceutically acceptable, may be employed in the preparation of salts useful as intermediates in obtaining the compounds of the invention and their pharmaceutically acceptable acid addition salts.

[0152] Exemplary bases include, but are not limited to, alkali metal (e.g., sodium) hydroxides, alkaline earth metal (e.g., magnesium) hydroxides, ammonia, and compounds of formula NW₄⁺, wherein W is C₁₋₄ alkyl, and the like.

[0153] Exemplary salts include, but are not limited to: acetate, adipate, alginate, aspartate, benzoate, benzenesulfonate, bisulfate, butyrate, citrate, camphorate, camphorsulfonate, cyclopentanepropionate, digluconate, dodecylsulfate, ethanesulfonate, fumarate, flucoheptanoate, glycerophosphate, hemisulfate, heptanoate, hexanoate, hydrochloride, hydrobromide, hydroiodide, 2-hydroxyethanesulfonate, lactate, maleate, methanesulfonate, 2-naphthalenesulfonate, nicotinate, oxalate, palmoate, pectinate, persulfate, phenylpropionate, picrate, pivalate, propionate, succinate, tartrate, thiocyanate, tosylate, undecanoate, and the like. Other examples of salts include anions of the compounds of the present invention compounded with a suitable cation such as Na⁺, NH₄⁺, and NW₄⁺ (wherein W is a C₁₋₄ alkyl group), and the like.

[0154] For therapeutic use, salts of the compounds of the present invention are contemplated as being pharmaceutically acceptable. However, salts of acids and bases that are non-pharmaceutically acceptable may also find use, for example, in the preparation or purification of a pharmaceutically acceptable compound.

[0155] Throughout the description, where compositions are described as having, including, or comprising specific components, or where processes and methods are described as having, including, or comprising specific steps, it is contemplated that, additionally, there are compositions of the present invention that consist essentially of, or consist of, the recited components, and that there are processes and methods according to the present invention that consist essentially of, or consist of, the recited processing steps.

[0156] As a general matter, compositions specifying a percentage are by weight unless otherwise specified. Further, if a variable is not accompanied by a definition, then the previous definition of the variable controls.
[0157] (a) Proteins

[0158] The present invention provides Fc-fused protein constructs comprising the amino acid sequences of a multisubunit protein. These fusion protein constructs can exhibit a higher serum half-life compared to a native/natural multisubunit protein, improved yield during production, enhanced stability during storage, and/or improved efficacy when used as a therapeutic.
[0159] (i) IgG1 Fc-fused proteins

[0160] In one aspect, the present invention provides a heterodimeric IgG1 Fc-fused protein comprising: a first polypeptide comprising a first antibody IgG1 Fc domain polypeptide and a second polypeptide comprising a second antibody IgG1 Fc domain polypeptide bound to the first antibody Fc domain, in which the first polypeptide further comprises a first subunit of a multisubunit protein fused by a linker comprising the amino acid sequence of SEQ ID NO:237 or SEQ ID NO:6 to the first antibody Fc domain polypeptide; a second, different subunit of the multisubunit protein is fused to the second antibody Fc domain polypeptide and the subunits of the multisubunit protein are bound to each other; when X₁ of SEQ ID NO: 237 or SEQ ID NO: 6 represents L and/or X₂ of SEQ ID NO: 237 or SEQ ID NO: 6 represents L, at least one of the first antibody Fc domain polypeptide and the second antibody Fc domain polypeptide comprises a Q347R mutation for promoting heterodimerization.

[0161] In some embodiments, within the heterodimeric Fc-fused protein, the linker connecting the a first subunit of a multisubunit protein to the first antibody Fc domain polypeptide consists of the amino acid sequence of SEQ ID NO:237 or SEQ ID NO:6.

[0162] In certain embodiments, the linker connecting the first subunit of a multisubunit protein to the first antibody Fc domain polypeptide further comprises a spacer peptide. In certain embodiments, the linker comprises a sequence of SEQ ID NO:237 or SEQ ID NO:6, and a spacer peptide.

[0163] In certain embodiments, the second, different subunit of the multisubunit protein is fused to the second antibody Fc domain polypeptide by a linker that comprises a sequence of SEQ ID NO:237 or SEQ ID NO:6, and a spacer peptide. In certain embodiments, the second, different subunit of the multisubunit protein is fused to the second antibody Fc domain polypeptide by a linker that consists of the amino acid sequence of SEQ ID NO:237 or SEQ ID NO:6. In certain embodiments, the amino acid sequence of the linker connecting the second, different subunit of the multisubunit protein to the second antibody Fc domain polypeptide is identical to the amino acid sequence of the linker connecting the subunit of the multisubunit protein to the first antibody Fc domain polypeptide.

[0164] Any spacer peptide described under the heading “Spacer peptides” can be employed. For example, in certain embodiments, the spacer peptide comprises the amino acid sequence set forth in any one of SEQ ID NOs:107-120. In certain embodiments, the spacer peptide consists of the amino acid sequence set forth in any one of SEQ ID NOs:107-120. In certain embodiments, the linker connecting the subunit of a multisubunit protein to the first antibody Fc domain polypeptide consists of, or consists essentially of, a spacer peptide disclosed herein and a peptide having the sequence of SEQ ID NO:237 or SEQ ID NO:6. In certain embodiments, the linker connecting the second, different subunit of the multisubunit protein to the second antibody Fc domain polypeptide consists of, or consists essentially of, a spacer peptide disclosed herein and a peptide having the sequence of SEQ ID NO:237 or SEQ ID NO:6. In certain embodiments, the spacer peptide is N-terminal to the either or both of the linkers.

[0165] In some embodiments, within the heterodimeric Fc-fused protein, the linker connecting the first subunit of the multisubunit protein to the first antibody Fc domain polypeptide comprises the amino acid sequence of SEQ ID NO:239 or SEQ ID NO:9. In some embodiments, within the heterodimeric Fc-fused protein, the linker connecting the first subunit of the multisubunit protein to the first antibody Fc domain polypeptide consists of the amino acid sequence of SEQ ID NO:239 or SEQ ID NO:9.

[0166] In some embodiments, within the heterodimeric Fc-fused protein, the linker connecting the first subunit of the multisubunit protein to the first antibody Fc domain polypeptide comprises the amino acid sequence of SEQ ID NO:239). In some embodiments, within the heterodimeric Fc-fused protein, the linker connecting the first subunit of the multisubunit protein to the first antibody Fc domain polypeptide consists of the amino acid sequence SEQ ID NO:239.

[0167] In some embodiments, within the heterodimeric Fc-fused protein, the second, different subunit of the multisubunit protein is fused to the second antibody Fc domain polypeptide by a linker comprising the amino acid sequence of SEQ ID NO:10 or SEQ ID NO:244. In some embodiments, the second, different subunit of the multisubunit protein is fused to the second antibody Fe domain polypeptide by a linker consisting of the amino acid sequence of SEQ ID NO:10 or SEQ ID NO:244.

[0168] In some embodiments, within the heterodimeric Fc-fused protein, the second, different subunit of the multisubunit protein is fused to the second antibody Fc domain polypeptide by a linker comprising the amino acid sequence of SEQ ID NO:10. In some embodiments, the second, different subunit of the multisubunit protein is fused to the second antibody Fc domain polypeptide by a linker consisting of the amino acid sequence of SEQ ID NO: 10.

[0169] In some embodiments, within the heterodimeric Fc-fused protein, the linker connecting the subunit of the multisubunit protein to the first antibody Fc domain polypeptide comprises the amino acid sequence of SEQ ID NO:238 or SEQ ID NO:7. In some embodiments, within the heterodimeric Fc-fused protein, the linker fusing the first subunit of the multisubunit protein to the first antibody Fc domain polypeptide consists of the amino acid sequence of SEQ ID NO:238 or SEQ ID NO:7.

[0170] In some embodiments, within the heterodimeric Fc-fused protein, the second, different subunit of the multisubunit protein is fused to the second antibody Fc domain polypeptide by a linker comprising the amino acid sequence of SEQ ID NO:8 or SEQ ID NO:241. In some embodiments, the second, different subunit of the multisubunit protein is fused to the second antibody Fc domain polypeptide by a linker consisting of the amino acid sequence of SEQ ID NO:8 or SEQ ID NO:241.

[0171] In some embodiments, within the heterodimeric Fc-fused protein, the second, different subunit of the multisubunit protein is fused to the second antibody Fc domain polypeptide by a linker comprising the amino acid sequence of SEQ ID NO:15 or SEQ ID NO:242. In some embodiments, the second, different subunit of the multisubunit protein is fused to the second antibody Fc domain polypeptide by a linker consisting of the amino acid sequence of SEQ ID NO:15 or SEQ ID NO:242.

[0172] In some embodiments, within the heterodimeric Fc-fused protein, the second, different subunit of the multisubunit protein is fused to the second antibody Fc domain polypeptide by a linker comprising the amino acid sequence of SEQ ID NO:16 or SEQ ID NO:243. In some embodiments, the second, different subunit of the multisubunit protein is fused to the second antibody Fc domain polypeptide by a linker consisting of the amino acid sequence of SEQ ID NO:16 or SEQ ID NO:243.

[0173] In some embodiments, within the heterodimeric Fc-fused protein, the second, different subunit of the multisubunit protein is fused to the second antibody Fc domain polypeptide by a linker comprising the amino acid sequence of SEQ ID NO:65 or SEQ ID NO:245. In some embodiments, the second, different subunit of the multisubunit protein is fused to the second antibody Fc domain polypeptide by a linker consisting of the amino acid sequence of SEQ ID NO:65 or SEQ ID NO:245.

[0174] In some embodiments, within the heterodimeric Fc-fused protein, the second, different subunit of the multisubunit protein is fused to the second antibody Fc domain polypeptide by a linker comprising the amino acid sequence of SEQ ID NO:66 or SEQ ID NO:246. In some embodiments, the second, different subunit of the multisubunit protein is fused to the second antibody Fc domain polypeptide by a linker consisting of the amino acid sequence of SEQ ID NO:66 or SEQ ID NO:246.

[0175] In some embodiments, within the heterodimeric Fc-fused protein, the linker connecting the first subunit of the multisubunit protein to the first antibody Fc domain polypeptide comprises the amino acid sequence of SEQ ID NO:11 or SEQ ID NO:240. In some embodiments, within the heterodimeric Fc-fused protein, the linker fusing the first subunit of the multisubunit protein to the first antibody Fc domain polypeptide consists of the amino acid sequence of SEQ ID NO:11 or SEQ ID NO:240.

[0176] In some embodiments, within the heterodimeric Fc-fused protein, the second, different subunit of the multisubunit protein is fused to the second antibody Fc domain polypeptide by a linker comprising the amino acid sequence of SEQ ID NO:12 or SEQ ID NO:247. In some embodiments, the second, different subunit of the multisubunit protein is fused to the second antibody Fc domain polypeptide by a linker consisting of the amino acid sequence of SEQ ID NO:12 or SEQ ID NO:247.

[0177] In some embodiments, within the heterodimeric Fc-fused protein, the second, different subunit of the multisubunit protein is fused to the second antibody Fc domain polypeptide by a linker comprising the amino acid sequence of SEQ ID NO:67 or SEQ ID NO:248. In some embodiments, the second, different subunit of the multisubunit protein is fused to the second antibody Fc domain polypeptide by a linker consisting of the amino acid sequence of SEQ ID NO:67 or SEQ ID NO:248.

[0178] In some embodiments, within the heterodimeric Fc-fused protein, the second, different subunit of the multisubunit protein is fused to the second antibody Fc domain polypeptide by a linker comprising the amino acid sequence of SEQ ID NO:68 or SEQ ID NO:249. In some embodiments, the second, different subunit of the multisubunit protein is fused to the second antibody Fe domain polypeptide by a linker consisting of the amino acid sequence of SEQ ID NO:68 or SEQ ID NO:249.

[0179] In certain embodiments the Fc domain polypeptide is that of an IgG1 Fc. In some embodiments, a protein of the current invention includes, a first antibody Fc domain polypeptide and a second antibody Fc domain polypeptide, which are both mutated IgG1 Fc domain polypeptides that promote heterodimerization with each other. For example, if the Fc domain is derived from the Fc of a human IgG1, the Fc domain can comprise an amino acid sequence at least 90% identical to amino acids 234-332 of a human IgG1 antibody, and differ at one or more position(s) selected from the group consisting of Q347, Y349, L351, S354, E356, E357, K360, Q362, S364, T366, L368, K370, N390, K392, T394, D399, S400, D401, F405, Y407, K409, T411, and K439.

[0180] In some embodiments, the antibody constant domain can comprise an amino acid sequence at least 90% identical to amino acids 234-332 of a human IgG1 antibody, and differ by one or more substitution(s) selected from the group consisting of Q347E, Q347R, Y349S, Y349K, Y349T, Y349D, Y349E, Y349C, L351K, L351D, L351Y, S354C, E356K, E357Q, E357L, E357W, K360E, K360W, Q362E, S364K, S364E, S364H, S364D, T366V, T366I, T366L, T366M, T366K, T366W, T366S, L368E, L368A, L368D, K370S, N390D, N390E, K392L, K392M, K392V, K392F, K392D, K392E, T394F, D399R, D399K, D399V, S400K, S400R, D401K, F405A, F405T, Y407A, Y407I, Y407V, K409F, K409W, K409D, T411D, T411E, K439D, and K439E. All the amino acid positions in an Fc domain or hinge region disclosed herein are numbered according to EU numbering.

[0181] In some embodiments, the first antibody IgG1 Fc domain polypeptide includes one or more mutation(s) selected from K360E and K409W, and the second antibody IgG1 Fc domain polypeptide includes one or more mutation(s) selected from Q347R, D399V, and F405T. In some embodiments, the first antibody IgG1 Fc domain polypeptide includes one or more mutation(s) selected from Q347R, D399V, and F405T, and the second antibody IgG1 Fc domain polypeptide includes one or more mutation(s) selected from K360E and K409W. In some embodiments, the first antibody IgG1 Fc domain polypeptide includes mutations K360E and K409W, and the second antibody IgG1 Fc domain polypeptide includes mutations Q347R, D399V, and F405T. In some embodiments, the first antibody IgG1 Fc domain polypeptide includes mutations Q347R, D399V, and F405T, and the second antibody IgG1 Fc domain polypeptide includes mutations K360E and K409W.

[0182] In some embodiments, a heterodimeric Fc-fused protein of the present invention with an IgG1 Fc includes one or more mutation(s) to reduce binding to an FcγR (e.g., FcγRI, FcγRIIA, FcγRIIB, FcγRIIIA, or FcγRIIIB) or a complement component (e.g., C1q) in the first and/or second polypeptides. Such mutations are useful for reducing effector functions. For example, a protein of the present disclosure includes L234A and L235A mutations; L234A, L235A, and P329A mutations; L234A, L235A, and P329G mutations; or L234A, L235E, G237A, A330S, and P331S mutations.

[0183] In some embodiments, a heterodimeric Fc-fused protein according to the invention includes a first antibody IgG4 or IgG1 Fc domain polypeptide and the second antibody IgG4 or IgG1 Fc domain polypeptide each containing the mutation P329G or P329A. In specific embodiments, a heterodimeric Fc-fused protein according to the invention comprises a first antibody IgG4 or IgG1 Fc domain polypeptide and a second antibody IgG4 or IgG1 Fc domain polypeptide each comprising the mutation P329A.

[0184] In some embodiments, the first IgG1 antibody Fe domain polypeptide and the second, different IgG1 antibody Fe domain polypeptide each contain a mutation selected from A330S and P331S. In some embodiments, the first IgG1 antibody Fe domain polypeptide and the second, different IgG1 antibody Fe domain polypeptide each contain the mutations A330S and P331S.

[0185] In certain embodiments, an additional disulfide bond between IgG1 Fc monomers is introduced, which improves the stability of the heterodimer. In an exemplary embodiment, the first antibody Fe domain polypeptide fused to the first subunit of a multisubunit protein includes a Y349C substitution in the CH3 domain, which forms a disulfide bond with an S354C substitution on the second antibody Fe domain polypeptide fused to the second, different subunit of a multisubunit protein. Alternatively, the first antibody Fe domain polypeptide fused to the first subunit of a multisubunit protein includes an S354C substitution in the CH3 domain, which forms a disulfide bond with a Y349C substitution on the second antibody Fe domain polypeptide fused to the second, different subunit of a multisubunit protein.

[0186] Any of the IgG1 antibody Fe domain polypeptides provided in Table 2 below can be employed in combination with any of the IgG1 hinge sequences (which, in the current invention, is part or the entirety of a linker connecting the protein sequence of the first subunit of the multisubunit protein to the first IgG1 antibody Fe domain polypeptide, or a linker connecting the additional subunit to the second, different IgG1 antibody Fe domain polypeptide) provided in Table 1 below. Exemplary IgG1 hinge-Fc domain polypeptides are provided in Table 3 below. In certain embodiments, the first and second polypeptides of the Fc-fused protein comprise the amino acid sequences of SEQ ID NOs: 212 and 212; 213 and 214; 215 and 216; 217 and 218; 214 and 213; 216 and 215; or 218 and 217, respectively. In certain embodiments, the first and second polypeptides of the Fc-fused protein comprise the amino acid sequences of SEQ ID NOs:228 and 228; 229 and 230; 231 and 232; 233 and 234; 235 and 236; 230 and 229; 232 and 231; 234 and 233; 236 and 235; 228 and 250; 250 and 228; 250 and 250; 229 and 252; 252 and 229; 251 and 230; 230 and 251; 253 and 232; 232 and 253; 231 and 254; 254 and 231; 255 and 234; 234 and 255; 233 and 256; 256 and 233; 257 and 236; 236 and 257; 258 and 235; or 235 and 258, respectively.
[0187] (ii) IgG4 Fc-fused proteins

[0188] In one aspect, the current invention provides an improvement on a multisubunit protein. In one aspect the present invention provides a heterodimeric IgG4 Fc-fused protein comprising: a first polypeptide comprising a first antibody IgG4 Fc domain polypeptide and a second polypeptide comprising a second, different antibody IgG4 Fc domain polypeptide bound to the first antibody Fc domain polypeptide, in which the first polypeptide further comprises a first subunit of a multisubunit protein fused by a linker comprising the amino acid sequence of SEQ ID NO:1 to the first antibody IgG4 Fc domain polypeptide; a second, different subunit of the multisubunit protein is fused to the second antibody IgG4 Fc domain polypeptide and the subunits of the multisubunit protein are bound to each other; the first antibody Fc domain polypeptide and the second antibody IgG4 Fc domain polypeptide each contain different mutations promoting heterodimerization.

[0189] In some embodiments, within the heterodimeric IgG4 Fc-fused protein, the linker connecting the a first subunit of a multisubunit protein to the first antibody Fc domain polypeptide consists of the amino acid sequence of SEQ ID NO: 1.

[0190] In certain embodiments, the linker connecting the protein sequence of a first subunit of a multisubunit protein to the first antibody Fc domain polypeptide further comprises a spacer peptide. In certain embodiments, the linker comprises a sequence of SEQ ID NO:1 and a spacer peptide.

[0191] In certain embodiments, the second, different subunit of the multisubunit protein is fused to the second antibody Fc domain polypeptide by a linker that comprises a sequence of SEQ ID NO: 1, and a spacer peptide. In certain embodiments, the second, different subunit of the multisubunit protein is fused to the second antibody Fc domain polypeptide by a linker that consists of the amino acid sequence of SEQ ID NO: 1. In certain embodiments, the amino acid sequence of the linker connecting the second, different subunit of the multisubunit protein to the second antibody Fe domain polypeptide is identical to the amino acid sequence of the linker connecting the subunit of the multisubunit protein to the first antibody Fc domain polypeptide.

[0192] Any spacer peptide described under the heading “Spacer peptides” can be employed. For example, in certain embodiments, the spacer peptide comprises the amino acid sequence set forth in any one of SEQ ID NOs: 107-120. In certain embodiments, the spacer peptide consists of the amino acid sequence set forth in any one of SEQ ID NOs: 107-120. In certain embodiments, the linker connecting the subunit of the multisubunit protein to the first antibody Fc domain polypeptide consists of, or consists essentially of, a spacer peptide disclosed herein and SEQ ID NO:1. In certain embodiments, the linker consists of, or consists essentially of, a spacer peptide disclosed herein and SEQ ID NO:1. In certain embodiments, the spacer peptide is N-terminal to the first linker and/or the second linker.

[0193] In some embodiments, within the heterodimeric Fc-fused protein, the linker connecting the subunit of the multisubunit protein to the first antibody Fc domain polypeptide comprises the amino acid sequence of SEQ ID NO:2. In some embodiments, the linker fusing the first subunit of the multisubunit protein to the first antibody Fc domain polypeptide consists of the amino acid sequence of SEQ ID NO:2.

[0194] In some embodiments, the second, different subunit of the multisubunit protein is fused to the second antibody Fc domain polypeptide by a linker comprising the amino acid sequence of SEQ ID NO:3. In some embodiments, the second, different subunit of the multisubunit protein is fused to the second antibody Fc domain polypeptide by a linker consisting of the amino acid sequence of SEQ ID NO:3.

[0195] In some embodiments, the second, different subunit of the multisubunit protein is fused to the second antibody Fc domain polypeptide by a linker comprising the amino acid sequence of SEQ ID NO:13. In some embodiments, the second, different subunit of the multisubunit protein is fused to the second antibody Fc domain polypeptide by a linker consisting of the amino acid sequence of SEQ ID NO:13.

[0196] In some embodiments, the second, different subunit of the multisubunit protein is fused to the second antibody Fc domain polypeptide by a linker comprising the amino acid sequence of SEQ ID NO:14. In some embodiments, the second, different subunit of the multisubunit protein is fused to the second antibody Fc domain polypeptide by a linker consisting of the amino acid sequence of SEQ ID NO:14.

[0197] In some embodiments, within the heterodimeric Fc-fused protein, the linker connecting the first subunit of the multisubunit protein to the first antibody Fc domain polypeptide comprises the amino acid sequence of SEQ ID NO:4. In some embodiments, the linker fusing the first subunit of the multisubunit protein to the first antibody Fc domain polypeptide consists of the amino acid sequence of SEQ ID NO:4.

[0198] In some embodiments, the second, different subunit of the multisubunit protein is fused to the second antibody Fc domain polypeptide by a linker comprising the amino acid sequence of SEQ ID NO:5. In some embodiments, the second, different subunit of the multisubunit protein is fused to the second antibody Fc domain polypeptide by a linker consisting of the amino acid sequence of SEQ ID NO:5.

[0199] In some embodiments, the second, different subunit of the multisubunit protein is fused to the second antibody Fc domain polypeptide by a linker comprising the amino acid sequence of SEQ ID NO:63. In some embodiments, the second, different subunit of the multisubunit protein is fused to the second antibody Fc domain polypeptide by a linker consisting of the amino acid sequence of SEQ ID NO:63.

[0200] In some embodiments, the second, different subunit of the multisubunit protein is fused to the second antibody Fc domain polypeptide by a linker comprising the amino acid sequence of SEQ ID NO:64. In some embodiments, the second, different subunit of the multisubunit protein is fused to the second antibody Fc domain polypeptide by a linker consisting of the amino acid sequence of SEQ ID NO:64.

[0201] In certain embodiments the Fc domain polypeptide is that of an IgG4 Fc. IgG4 is an unstable dimer that can undergo a Fab-arm exchange and pair with other IgG4 antibodies in the body. In certain embodiments, a S228P mutation is introduced within the hinge (which, in the current invention, is part or the entirety of a linker connecting the first subunit of the multisubunit protein to the first IgG4 antibody Fc domain polypeptide, or a linker connecting the additional subunit to the second, different IgG4 antibody Fc domain polypeptide), which increases the stability of the hinge region and reduces the chance for Fab-arm exchange. In certain embodiments, an additional disulfide bond between Fc domain polypeptide monomers is introduced, which improves the stability of the heterodimer. In an exemplary embodiment, the first antibody Fc domain polypeptide linked to the first subunit of the multisubunit protein includes a Y349C substitution in the CH3 domain, which forms a disulfide bond with an S354C substitution on the second antibody Fc domain polypeptide linked to the second, different subunit of the multisubunit protein linked to the second antibody Fc domain polypeptide. Alternatively, the first antibody Fc domain polypeptide linked to the first subunit of the multisubunit protein includes an S354C substitution in the CH3 domain, which forms a disulfide bond with a Y349C substitution on the second antibody Fe domain polypeptide linked to the second, different subunit of the multisubunit protein.

[0202] In some embodiments, a protein of the current invention includes, a first antibody Fc domain polypeptide and a second antibody Fc domain polypeptide, which are both mutated IgG4 Fc domain polypeptides that promote heterodimerization with each other.

[0203] In some embodiments, the first antibody IgG4 Fc domain polypeptide includes one or more mutation(s) selected from K360E, K370E, and R409W, and the second antibody IgG4 Fc domain polypeptide includes one or more mutation(s) selected from E357N, Q347R, D399V, and F405T. In some embodiments, the first antibody IgG4 Fc domain polypeptide includes mutations K370E and R409W, and the second antibody IgG4 Fc domain polypeptide includes mutations E357N, D399V, and F405T. In some embodiments, the first antibody IgG4 Fc domain polypeptide includes mutations E357N, D399V, and F405T, and the second antibody IgG4 Fc domain polypeptide includes mutations K370E and R409W. In some embodiments, the first antibody IgG4 Fc domain polypeptide includes mutations K360E and R409W, and the second antibody IgG4 Fc domain polypeptide includes mutations Q347R, D399V, and F405T. In some embodiments, the first antibody IgG4 Fc domain polypeptide includes mutations Q347R, D399V, and F405T, and the second antibody IgG4 Fc domain polypeptide includes mutations K360E and R409W.

[0204] In some embodiments, a heterodimeric Fc-fused protein of the present invention with an IgG4 Fc includes one or more mutation(s) to reduce binding to an FcγR (e.g., FcγRI, FcγRIIA, FcγRIIB, FcγRIIIA, or FcγRIIIB) or a complement component (e.g., C1q) in the first and/or second polypeptide(s). Such mutations are useful for reducing effector functions. For example, a protein of the present disclosure includes S228P and L235E mutations; S228P, L235E, and P329A mutations; or S228P, L235E, and P329G mutations.

[0205] Any of the IgG4 antibody Fc domain polypeptides provided in Table 2 can be employed in combination with any of the IgG4 hinge sequences (which, in the current invention, is part or the entirety of a linker connecting the first subunit of the multisubunit protein to the first IgG4 antibody Fc domain polypeptide, or a linker connecting the second, different subunit of the multisubunit protein to the second, different IgG4 antibody Fc domain polypeptide) provided in Table 1. Exemplary IgG4 hinge-Fc domain polypeptides are provided in Table 3. In certain embodiments, the first and second polypeptides of the Fc-fused protein comprise the amino acid sequences of SEQ ID NOs:205 and 205; 206 and 207; 208 and 209; 210 and 211; 207 and 206; 209 and 208; or 211 and 210, respectively. In certain embodiments, the first and second polypeptides of the Fc-fused protein comprise the amino acid sequences of SEQ ID NOs:219 and 219; 220 and 221; 222 and 223; 224 and 225; 226 and 227; 221 and 220; 223 and 222; 225 and 224; or 227 and 226, respectively.
[0206] (b) Disulfide Bonds

[0207] Some heterodimeric Fc-fused proteins of the present invention include the native heterodimer disulfide bond between the first subunit of a multisubunit protein and the second, different subunit of the multisubunit protein. For example, in an exemplary embodiment, a heterodimeric Fc-fused protein according to the invention includes a native heterodimer disulfide bond between p35 and p40 subunits of IL-12. Such a protein includes the native disulfide bond between C74 of p35 and C177 of p40.

[0208] Some heterodimeric Fc-fused proteins of the present invention include an artificial or engineered heterodimer disulfide bond between the first subunit of a multisubunit protein and the second, different subunit of the multisubunit protein. For example, in an exemplary embodiment, a heterodimeric Fc-fused protein according to the invention includes an artificial or engineered heterodimer disulfide bond between p35 and p40 subunits of IL-12. Such a protein includes an artificial or engineered disulfide bond between V185C of p35 and Y292C of p40.

[0209] Some heterodimeric Fc-fused proteins of the present invention include the native heterodimer disulfide bond between the first subunit of a multisubunit protein and the second, different subunit of the multisubunit protein, and an artificial or engineered heterodimer disulfide bond between the first subunit of a multisubunit protein and the second, different subunit of the multisubunit protein. For example, in an exemplary embodiment, a native heterodimer disulfide bond between p35 and p40 subunits of IL-12, and includes an artificial or engineered heterodimer disulfide bond between p35 and p40 subunits of IL-12. Such a protein includes the native disulfide bond between C74 of p35 and C177 of p40, and an artificial or engineered disulfide bond between V185C of p35 and Y292C of p40.

[0210] Some heterodimeric Fc-fused proteins of the present invention are engineered to remove the native disulfide bond, and to replace it with a non-native artificial or engineered disulfide bond. For example, in an exemplary embodiment, a heterodimeric Fc-fused protein according to the invention includes p35 of IL-12 in which the native C74 is mutated to serine, and a p40 of IL-12 in which the native C177 is mutated to serine, thereby removing the native disulfide bond between p35 and p40 subunits of IL-12. To this mutated IL-12, two new mutations are introduced, V185C on p35 and Y292C on p40, thereby introducing a non-native artificial or engineered disulfide bond.
[0211] (c) Sequences of components of Fc-fused polypeptides

[0212] Exemplary heterodimeric Fe-fused proteins of the present invention are constructed with any one of the IgG1 or IgG4 Fe variant sequenees and any one of the corresponding linker sequenees described in the Tables 1-2 below. The fusion protein constructs of the present invention can confer a higher serum half-life compared to a native/natural multisubunit protein, improve yield of the proteins during production, enhance stability during storage, and/or improve efficacy when used as a therapeutic.

[0213] Any of the IgG4 antibody Fe variant domain polypeptides provided in Table 2 below can be employed in combination with any of the IgG4 hinge sequenees provided in Table 1 below. Similarly, any of the IgG1 antibody Fe variant domain polypeptides provided in Table 2 below can be employed in combination with any of the IgG1 hinge sequenees provided in Table 1 below. Exemplary IgG1 hinge-Fe domain polypeptides are provided in Table 3 below.

TABLE 1
Linker Variants

| Hinge | Amino Acid Sequence |
|---|---|
| IgG4 hinge consensus | SEQ ID NO:1 |
| IgG4 hinge S228P | SEQ ID NO:2 |
| IgG4 hinge S228P/L235E | SEQ ID NO:4 |
| IgG1 hinge consensus | SEQ ID NO:6 |
| IgG1 hinge C220S | SEQ ID NO:7 |
| IgG1 hinge C220S/L234A/L235A | SEQ ID NO:9 |
| IgG1 hinge C220S/L234A/L235E/G237A | SEQ ID NO:11 |
| IgG1 hinge ΔE216 | SEQ ID NO:237 |
| IgG1 hinge ΔE216/C220S | SEQ ID NO:238 |
| IgG1 hinge ΔE216/C220S/L234A/L235A | SEQ ID NO:239 |
| IgG1 hinge ΔE216/C220S/L234A/L235E/G237A | SEQ ID NO:240 |

TABLE 2
IgG4 Fc and IgG1 Fc Wild-type Sequences; and Exemplary IgG4 Antibody Fc Variant
and IgG1 Antibody Fc Variant Sequences (amino acid substitutions are indicated in bold and
underline)

| Fc domain | Amino Acid Sequence* |
|---|---|
| IgG4 Fc wild-type | SEQ ID NO:205 |
| IgG4 Fc Y349C/K370E/R409W | SEQ ID NO:206 |
| IgG4 Fc S354C/E357N/D399V/F405T | SEQ ID NO:207 |
| IgG4 Fc Y349C/K360E/R409W | SEQ ID NO:208 |
| IgG4 Fc Q347R/S354C/D399V/F405T | SEQ ID NO:209 |
| IgG4 Fc P329A/Y349C/K360E/R409W | SEQ ID NO:210 |
| IgG4 Fc P329A/S354C/Q347R/D399V/ | SEQ ID NO:211 |
| F405T | |
| IgG1 Fc wild-type | SEQ ID NO:212 |
| IgG1 Fc Y349C/K360E/K409W | SEQ ID NO:213 |
| IgG1 Fc Q347R/S354C/D399V/F405T | SEQ ID NO:214 |
| IgG1 Fc P329A/Y349C/K360E/K409W | PSVFLFPPKPKDTLMISRTPEVTCVVVDVS |
| | HEDPEVKFNWYVDGVEVHNAKTKPREEQ |
| | YNSTYRVVSVLTVLHQDWLNGKEYKCK |
| | VSNKALAAPIEKTISKAKGQPREPQVCTLP |
| | PSRDELTENQVSLTCLVKGFYPSDIAVEW |
| | ESNGQPENNYKTTPPVLDSDGSFFLYSWL |
| | TVDKSRWQQGNVFSCSVMHEALHNHYT |
| | QKSLSLSPG (SEQ ID NO:215) |
| IgG1 Fc | PSVFLFPPKPKDTLMISRTPEVTCVVVDVS |
| P329A/Q347R/S354C/D399V/F405T | HEDPEVKFNWYVDGVEVHNAKTKPREEQ |
| | YNSTYRVVSVLTVLHQDWLNGKEYKCK |
| | VSNKALAAPIEKTISKAKGQPREPRVYTLP |
| | PCRDELTKNQVSLTCLVKGFYPSDIAVEW |
| | ESNGQPENNYKTTPPVLVSDGSFTLYSKL |
| | TVDKSRWQQGNVFSCSVMHEALHNHYT |
| | QKSLSLSPG (SEQ ID NO:216) |
| IgG1 Fc A330S/P331S/Y349C/K360E/ | SEQ ID NO:217 |
| K409W | |
| IgG1 Fc A330S/P331S/Q347R/S354C/ | SEQ ID NO:218 |
| D399V/F405T | |

*The amino acid sequences can further comprise a lysine (K) at the C-terminus.

TABLE 3
S228P mutated IgG4 Hinge-Fc (wild-type); Exemplary S228P mutated IgG4 Hinge-Fc
Variants or Hinge Portion-Fc Variants; C220S mutated IgG1 Hinge-Fc (wild-type); Exemplary
C220S mutated IgG1 Hinge-Fc Variants or Hinge Portion-Fc Variants

| | Amino Acid |
|---|---|
| Linker-Fc | Sequence* |
| IgG4 hinge-Fc S228P | SEQ ID NO:219 |
| IgG4 hinge-Fc S228P/Y349C/K370E/R409W | SEQ ID NO:220 |
| IgG4 hinge-Fc S228P/S354C/E357N/D399V/F405T | SEQ ID NO:221 |
| IgG4 hinge-Fc S228P/Y349C/K360E/R409W | SEQ ID NO:222 |
| IgG4 hinge-Fc S228P/Q347R/S354C/D399V/ F405T | SEQ ID NO:223 |
| IgG4 hinge-Fc S228P/L235E/Y349C/K360E/R409W | SEQ ID NO:224 |
| IgG4 hinge-Fc S228P/L235E/S354C/Q347R/ D399V/F405T | SEQ ID NO:225 |
| IgG4 hinge-Fc S228P/L235E/P329A/Y349C/K360E/R409W | SEQ ID NO:226 |
| IgG4 hinge-Fc S228P/L235E/ P329A/S354C/Q347R/D399V/F405T | SEQ ID NO:227 |
| IgG1 hinge-Fc C220S | SEQ ID NO:228 |
| IgG1 hinge-Fc ΔE216/C220S | SEQ ID NO:250 |
| IgG1 hinge-Fc C220S/Y349C/K360E/K409W | SEQ ID NO:229 |
| IgG1 hinge-Fc ΔE216/C220S/Y349C/K360E/ K409W | SEQ ID NO:251 |
| IgG1 hinge-Fc C220S/Q347R/S354C/D399V/ F405T | SEQ ID NO:230 |
| IgG1 hinge-Fc ΔE216/C220S/Q347R/S354C/ D399V/F405T | SEQ ID NO:252 |
| IgG1 hinge-Fc C220S/L234A/L235A/Y349C/K360E/K409W | SEQ ID NO:231 |
| IgG1 hinge-Fc ΔE216/C220S/L234A/L235A/Y349C/K360E/K409W | SEQ ID NO:253 |
| IgG1 hinge-Fc C220S/L234A/L235A/Q347R/S354C/D399V/F405T | SEQ ID NO:232 |
| IgG1 hinge-Fc ΔE216/C220S/L234A/L235A/ | SEQ ID NO:254 |
| Q347R/S354C/D399V/F405T | |
| IgG1 hinge-Fc C220S/L234A/L235A/P329A/Y349C/K360E/K409W | SEQ ID NO:233 |
| IgG1 hinge-Fc ΔE216/C220S/L234A/L235A/ | SEQ ID NO:255 |
| P329A/Y349C/K360E/K409W | |
| IgG1 hinge-Fc C220S/L234A/L235A/P329A/ | SEQ ID NO:234 |
| Q347R/S354C/D399V/F405T | |
| IgG1 hinge-Fc ΔE216/C220S/L234A/L235A/ | SEQ ID NO:256 |
| P329A/Q347R/S354C/D399V/F405T | |
| IgG1 hinge-Fc C220S/L234A/L235E/G237A/ | SEQ ID NO:235 |
| A330S/P331S/Y349C/K360E/K409W | |
| IgG1 hinge-Fc ΔE216/C220S/L234A/L235E/ | SEQ ID NO:257 |
| G237A/A330S/P331S/Y349C/K360E/K409W | |
| IgG1 hinge-Fc C220S/L234A/L235E/G237A/ | SEQ ID NO:236 |
| A330S/P331S/Q347R/S354C/D399V/F405T | |
| IgG1 hinge-Fc ΔE216/C220S/L234A/L235E/ | SEQ ID NO:258 |
| G237A/A330S/P331S/Q347R/S354C/D399V/F405T | |

*The amino acid sequences can further comprise a lysine (K) at the C-terminus.

| | | |
|---|---|---|
| | Sequences of | |
| | Heterodimeric | Type of IgG (IL-12 subunit); |
| Linker | Fc-fused | mutations/ |
| Sequence | Proteins* | substitutions |

Construct 101

| | | |
|---|---|---|
| SEQ ID NO:2 | SEQ ID NO:129 | IgG4 (IL-12 p40); |
| | | Heterodimerization mutations: K370E/R409W; |
| | | Substitution for stabilizing disulfide bond: Y349C; |
| | | Substitution for preventing Fab-arm exchange and improving |
| | | thermostability: S228P |
| SEQ ID NO:3 | SEQ ID NO:130 | IgG4 (IL-12 p35); |
| | | Heterodimerization mutations: E357N/D399V/F405T; |
| | | Substitution for stabilizing disulfide bond: S354C; |
| | | Substitution for preventing Fab-arm exchange and improving |
| | | thermostability: S228P |

Construct 102

| | | |
|---|---|---|
| SEQ ID NO:2 | SEQ ID NO:131 | IgG4 (IL-12 p40); |
| | | Heterodimerization mutations: K360E/R409W; |
| | | Substitution for stabilizing disulfide bond: Y349C; |
| | | Substitution for preventing Fab-arm exchange and improving |
| | | thermostability: S228P |
| SEQ ID NO:3 | SEQ ID NO:132 | IgG4 (IL-12 p35); |
| | | Heterodimerization mutations: Q347R/D399V/F405T; |
| | | Substitution for stabilizing disulfide bond: S354C; |
| | | Substitution for preventing Fab-arm exchange and improving |
| | | thermostability: S228P |

Construct 103

| | | |
|---|---|---|
| SEQ ID NO:4 | SEQ ID NO:133 | IgG4 (IL-12 p40); |
| | | Heterodimerization mutations: K360E/R409W; |
| | | Substitution for stabilizing disulfide bond: Y349C; |
| | | Substitution for preventing Fab-arm exchange and improving |
| | | thermostability: S228P; |
| | | Substitutions for reducing FcγR binding: S228P and L235E |
| SEQ ID NO:5 | SEQ ID NO:134 | IgG4 (IL-12 p35); |
| | | Heterodimerization mutations: Q347R/D399V/F405T; |
| | | Substitution for stabilizing disulfide bond: S354C; |
| | | Substitution for preventing Fab-arm exchange and improving |
| | | thermostability: S228P; |
| | | Substitutions for reducing FcγR binding: S228P and L235E |

Construct 104

| | | |
|---|---|---|
| SEQ ID NO:4 | SEQ ID NO:135 | IgG4 (IL-12 p40); |
| | | Heterodimerization mutations: K360E/R409W; |
| | | Substitution for stabilizing disulfide bond: Y349C; |
| | | Substitution for preventing Fab-arm exchange and improving |
| | | thermostability: S228P; |
| | | Substitutions for reducing FcγR binding: S228P, L235E, |
| | | P329A |
| SEQ ID NO:5 | SEQ ID NO:136 | IgG4 (IL-12 p35); |
| | | Heterodimerization mutations: Q347R/D399V/F405T; |
| | | Substitution for stabilizing disulfide bond: S354C; |
| | | Substitution for preventing Fab-arm exchange and improving |
| | | thermostability: S228P; |
| | | Substitutions for reducing FcγR binding: S228P, L235E, |
| | | P329A |

Construct 106

| | | |
|---|---|---|
| SEQ ID NO:7 | SEQ ID NO:137 | IgG1 (IL-12 p40); |
| OR | OR | Heterodimerization mutations: K360E/K409W; |
| SEQ ID | SEQ ID NO:259 | Substitution for stabilizing disulfide bond: Y349C; |
| NO:238 | | C220 in the upper hinge is mutated to S |
| SEQ ID NO:8 | SEQ ID NO:138 | IgG1 (IL-12 p35); |
| | | Heterodimerization mutations: Q347R/D399V/F405T; |
| | | Substitution for stabilizing disulfide bond: S354C; |
| | | C220 in the upper hinge is mutated to S |

Construct 107

| | | |
|---|---|---|
| SEQ ID NO:9 | SEQ ID NO:139 | IgG1FcSilent; |
| OR | OR | (IL-12 p40); |
| SEQ ID | SEQ ID NO:260 | Heterodimerization mutations: K360E/K409W; |
| NO:239 | | Substitution for stabilizing disulfide bond: Y349C; |
| | | Substitutions for reducing FcγR binding: L234A, L235A; |
| | | C220 in the upper hinge is mutated to S |
| SEQ ID | SEQ ID NO:140 | IgG1FcSilent; |
| NO:10 | | (IL-12 p35); |
| | | Heterodimerization mutations: Q347R/D399V/F405T; |
| | | Substitution for stabilizing disulfide bond: S354C; |
| | | Substitutions for reducing FcγR binding: L234A, L235A; |
| | | C220 in the upper hinge is mutated to S |

Construct 108

| | | |
|---|---|---|
| SEQ ID NO:9 | SEQ ID NO:141 | IgG1FcSilent; |
| OR | OR | (IL-12 p40); |
| SEQ ID | SEQ ID NO:261 | Heterodimerization mutations: K360E/K409W; |
| NO:239 | | Substitution for stabilizing disulfide bond: Y349C; |
| | | Substitutions for reducing FcγR binding: L234A, L235A, |
| | | P329A; |
| | | C220 in the upper hinge is mutated to S |
| SEQ ID | SEQ ID NO:142 | IgG1FcSilent; |
| NO:10 | | (IL-12 p35); |
| | | Heterodimerization mutations: Q347R/D399V/F405T; |
| | | Substitution for stabilizing disulfide bond: S354C; |
| | | Substitutions for reducing FcγR binding: L234A, L235A, |
| | | P329A; |
| | | C220 in the upper hinge is mutated to S |

Construct 110

| | | |
|---|---|---|
| SEQ ID | SEQ ID NO:143 | IgG1 Fc; |
| NO:11 | OR | (IL-12 p40); |
| OR | SEQ ID NO:262 | Heterodimerization mutations: K360E/K409W; |
| SEQ ID | | Substitution for stabilizing disulfide bond: Y349C ; |
| NO:240 | | Substitutions for reducing FcγR and C1q binding: L234A, |
| | | L235E, G237A, A330S, P331S |
| SEQ ID | SEQ ID NO:144 | IgG1 Fc; |
| NO:12 | | (IL-12 p35); |
| | | Heterodimerization mutations: Q347R/D399V/F405T; |
| | | Substitution for stabilizing disulfide bond: S354C; |
| | | Substitutions for reducing FcγR and C1q binding: L234A, |
| | | L235E, G237A, A330S, P331S |

Construct 111

| | | |
|---|---|---|
| SEQ ID NO:2 | SEQ ID NO:145 | IgG4 Fc; |
| | | (IL-12 p40); |
| | | Heterodimerization mutations: K370E/R409W; |
| | | Substitution for stabilizing disulfide bond: Y349C; |
| | | Substitution for preventing Fab-arm exchange and improving |
| | | thermostability: S228P |
| SEQ ID NO:2 | SEQ ID NO:146 | IgG4 Fc; |
| | | (IL-12 p35); |
| | | Heterodimerization mutations: E357N/D399V/F405T; |
| | | Substitution for stabilizing disulfide bond: S354C; |
| | | Substitution for preventing Fab-arm exchange and improving |
| | | thermostability: S228P |

Construct 112

| | | |
|---|---|---|
| SEQ ID NO:2 | SEQ ID NO:147 | IgG4 Fc; |
| | | (IL-12 p40); |
| | | Heterodimerization mutations: K370E/R409W; |
| | | Substitution for stabilizing disulfide bond: Y349C; |
| | | Substitution for preventing Fab-arm exchange and improving |
| | | thermostability: S228P; |
| SEQ ID | SEQ ID NO:148 | IgG4 Fc; |
| NO:13 | | (IL-12 p35); |
| | | Heterodimerization mutations: E357N/D399V/F405T; |
| | | Substitution for stabilizing disulfide bond: S354C; |
| | | Substitution for preventing Fab-arm exchange and improving |
| | | thermostability: S228P; |

Construct 113

| | | |
|---|---|---|
| SEQ ID NO:2 | SEQ ID NO:149 | IgG4Fc; |
| | | (IL-12 p40); |
| | | Heterodimerization mutations: K370E/R409W; |
| | | Substitution for stabilizing disulfide bond: Y349C; |
| | | Substitution for preventing Fab-arm exchange and improving |
| | | thermostability: S228P |
| SEQ ID | SEQ ID NO:150 | IgG4 Fc; |
| NO:14 | | (IL-12 p35); |
| | | Heterodimerization mutations: E357N/D399V/F405T; |
| | | Substitution for stabilizing disulfide bond: S354C; |
| | | Substitution for preventing Fab-arm exchange and improving |
| | | thermostability: S228P |

Construct 114

| | | |
|---|---|---|
| SEQ ID NO:7 | SEQ ID NO: 151 | IgG1 Fc; |
| OR | OR | (IL-12 p40); |
| SEQ ID | SEQ ID NO:263 | Heterodimerization mutations: K360E/K409W; |
| NO:238 | | Substitution for stabilizing disulfide bond: Y349C; |
| | | C220 in the upper hinge is mutated to S |
| SEQ ID NO:7 | SEQ ID NO:152 | IgG1 Fc; |
| | | (IL-12 p35); |
| | | Heterodimerization mutations: Q347R/D399V/F405T; |
| | | Substitution for stabilizing disulfide bond: S354C; |
| | | C220 in the upper hinge is mutated to S |

Construct 115

| | | |
|---|---|---|
| SEQ ID NO:7 | SEQ ID NO:153 | IgG1 Fc; |
| OR | OR | (IL-12 p40); |
| SEQ ID | SEQ ID NO:264 | Heterodimerization mutations: K360E/K409W; |
| NO:238 | | Substitution for stabilizing disulfide bond: Y349C; |
| | | C220 in the upper hinge is mutated to S |
| SEQ ID | SEQ ID NO:154 | IgG1 Fc; |
| NO:15 | | (IL-12 p35); |
| | | Heterodimerization mutations: Q347R/D399V/F405T; |
| | | Substitution for stabilizing disulfide bond: S354C; |
| | | C220 in the upper hinge is mutated to S |

Construct 116

| | | |
|---|---|---|
| SEQ ID NO:7 | SEQ ID NO:155 | IgG1 Fc; |
| OR | OR | (IL-12 p40); |
| SEQ ID | SEQ ID NO:265 | Heterodimerization mutations: K360E/K409W; |
| NO:238 | | Substitution for stabilizing disulfide bond: Y349C; |
| | | C220 in the upper hinge is mutated to S |
| SEQ ID | SEQ ID NO:156 | IgG1 Fc; |
| NO:16 | | (IL-12 p35); |
| | | Heterodimerization mutations: Q347R/D399V/F405T; |
| | | Substitution for stabilizing disulfide bond: S354C; |
| | | C220 in the upper hinge is mutated to S |

Construct 117

| | | |
|---|---|---|
| SEQ ID NO:8 | SEQ ID NO:157 | IgG1 Fc; |
| OR | OR | (IL-12 p35); |
| SEQ ID | SEQ ID NO:266 | Heterodimerization mutations: K360E/K409W; |
| NO:241 | | Substitution for stabilizing disulfide bond: Y349C; |
| | | C220 in the upper hinge is mutated to S |
| SEQ ID NO:7 | SEQ ID NO:158 | IgG1 Fc; |
| | | (IL-12 p40); |
| | | Heterodimerization mutations: Q347R/D399V/F405T; |
| | | Substitution for stabilizing disulfide bond: S354C; |
| | | C220 in the upper hinge is mutated to S |

Construct 118

| | | |
|---|---|---|
| SEQ ID | SEQ ID NO:159 | IgG1 (IL-12 p40); |
| NO:15 | OR | Heterodimerization mutations: K360E/K409W; |
| OR | SEQ ID NO:267 | Substitution for stabilizing disulfide bond: Y349C; |
| SEQ ID | | C220 in the upper hinge is mutated to S |
| NO:242 | | |
| SEQ ID | SEQ ID NO:160 | IgG1 (IL-12 p35); |
| NO:15 | | Heterodimerization mutations: Q347R/D399V/F405T; |
| | | Substitution for stabilizing disulfide bond: S354C; |
| | | C220 in the upper hinge is mutated to S |

Construct 119

| | | |
|---|---|---|
| SEQ ID | SEQ ID NO:161 | IgG1 (IL-12 p40); |
| NO:15 | OR | Heterodimerization mutations: K360E/K409W; |
| OR | SEQ ID NO:268 | p40 substitutions: C177S, Y292C; |
| SEQ ID | | (native disulfide bond between subunits is deleted) |
| NO:242 | | |
| SEQ ID | SEQ ID NO:162 | IgG1 (IL-12 p35); |
| NO:15 | | Heterodimerization mutations: Q347R/D399V/F405T; |
| | | p35 substitutions: C74S V185C; |
| | | (native disulfide bond between subunits is deleted) |

Construct 119-1

| | | |
|---|---|---|
| SEQ ID NO:2 | SEQ ID NO:163 | IgG4 (IL-12 p40); |
| | | Heterodimerization mutations: K370E/R409W; |
| | | p40 substitutions: C177S, Y292C; |
| | | (native disulfide bond between subunits is deleted); |
| | | Substitution for preventing Fab-arm exchange and improving |
| | | thermostability: S228P |
| SEQ ID NO:3 | SEQ ID NO:164 | IgG4 (IL-12 p35); |
| | | Heterodimerization mutations: E357N/D399V/F405T; |
| | | p35 substitutions: C74S V185C; |
| | | Substitution for preventing Fab-arm exchange and improving |
| | | thermostability: S228P |

Construct 119-2

| | | |
|---|---|---|
| SEQ ID NO:2 | SEQ ID NO:165 | IgG4 (IL-12 p40); |
| | | Heterodimerization mutations: K360E/R409W; |
| | | p40 substitutions: C177S, Y292C; |
| | | (native disulfide bond between subunits is deleted); |
| | | Substitution for preventing Fab-arm exchange and improving |
| | | thermostability: S228P |
| SEQ ID NO:3 | SEQ ID NO:166 | IgG4 (IL-12 p35); |
| | | Heterodimerization mutations: Q347R/D399V/F405T; |
| | | p35 substitutions: |
| | | C74S V185C; |
| | | Substitution for preventing Fab-arm exchange and improving |
| | | thermostability: S228P |

Construct 119-3

| | | |
|---|---|---|
| SEQ ID NO:4 | SEQ ID NO:167 | IgG4 (IL-12 p40) |
| | | Heterodimerization mutations: K360E/R409W; |
| | | p40 substitutions: C177S, Y292C; |
| | | (native disulfide bond between subunits is deleted); |
| | | Substitution for preventing Fab-arm exchange and improving |
| | | thermostability: S228P; |
| | | Substitutions for reducing FcγR binding: S228P and L235E |
| SEQ ID NO:5 | SEQ ID NO:168 | IgG4 (IL-12 p35); |
| | | Heterodimerization mutations: Q347R/D399V/F405T; |
| | | p35 substitutions: |
| | | C74S V185C; |
| | | Substitution for preventing Fab-arm exchange and improving |
| | | thermostability: S228P; |
| | | Substitutions for reducing FcγR binding: S228P and L235E |

Construct 119-4

| | | |
|---|---|---|
| SEQ ID NO:4 | SEQ ID NO:169 | IgG4 (IL-12 p40); |
| | | Heterodimerization mutations: K360E/R409W; |
| | | p40 substitutions: C177S, Y292C; |
| | | (native disulfide bond between subunits is deleted); |
| | | Substitution for preventing Fab-arm exchange and improving |
| | | thermostability: S228P; |
| | | Substitutions for reducing FcγR binding: S228P, L235E, |
| | | P329A |
| SEQ ID NO:5 | SEQ ID NO:170 | IgG4 (IL-12 p35); |
| | | Heterodimerization mutations: Q347R/D399V/F405T; |
| | | p35 substitutions: C74S V185C; |
| | | Substitution for preventing Fab-arm exchange and improving |
| | | thermostability: S228P; |
| | | Substitutions for reducing FcγR binding: S228P, L235E, |
| | | P329A |

Construct 119-5

| | | |
|---|---|---|
| SEQ ID NO:7 | SEQ ID NO:171 | IgG1 (IL-12 p40); |
| OR | OR | Heterodimerization mutations: K360E/K409W; |
| SEQ ID | SEQ ID NO:269 | p40 substitutions: C177S, Y292C; |
| NO:238 | | (native disulfide bond between subunits is deleted); |
| | | C220 in the upper hinge is mutated to S |
| SEQ ID NO:8 | SEQ ID NO:172 | IgG1 (IL-12 p35); |
| | | Heterodimerization mutations: Q347R/D399V/F405T; |
| | | p35 substitutions: C74S V185C; |
| | | C220 in the upper hinge is mutated to S |

Construct 119-6

| | | |
|---|---|---|
| SEQ ID NO:9 | SEQ ID NO:173 | IgG1 (IL-12 p40); |
| OR | OR | Heterodimerization mutations: K360E/K409W; |
| | SEQ ID NO:270 | p40 substitutions: C177S, Y292C; |
| SEQ ID | | (native disulfide bond between subunits is deleted); |
| NO:239 | | Substitutions for reducing FcγR binding: L234A, L235A; |
| | | C220 in the upper hinge is mutated to S |
| SEQ ID | SEQ ID NO:174 | IgG1 (IL-12 p35); |
| NO:10 | | Heterodimerization mutations: Q347R/D399V/F405T; |
| | | p35 substitutions: C74S V185C; |
| | | Substitutions for reducing FcγR binding: L234A, L235A; |
| | | C220 in the upper hinge is mutated to S |

Construct 119-7

| | | |
|---|---|---|
| SEQ ID NO:9 | SEQ ID NO:175 | IgG1 (IL-12 p40); |
| OR | OR | Heterodimerization mutations: K360E/K409W; |
| SEQ ID | SEQ ID NO:271 | p40 substitutions: C177S, Y292C; |
| NO:239 | | (native disulfide bond between subunits is deleted); |
| | | Substitutions for reducing FcγR binding: L234A, L235A, |
| | | P329A; |
| | | C220 in the upper hinge is mutated to S |
| SEQ ID | SEQ ID NO:176 | IgG1 (IL-12 p35); |
| NO:10 | | Heterodimerization mutations: Q347R/D399V/F405T; |
| | | p35 substitutions: C74S, V185C; |
| | | Substitutions for reducing FcγR binding: L234A, L235A, |
| | | P329A; |
| | | C220 in the upper hinge is mutated to S |

Construct 119-8

| | | |
|---|---|---|
| SEQ ID | SEQ ID NO:177 | IgG1 (IL-12 p40); |
| NO:11 | OR | Heterodimerization mutations: K360E/K409W; |
| OR | SEQ ID NO:272 | p40 substitutions: C177S, Y292C; |
| SEQ ID | | (native disulfide bond between subunits is deleted); |
| NO:240 | | Substitutions for reducing FcγR and C1q binding: L234A, |
| | | L235E, G237A, A330S, P331S; |
| | | C220 in the upper hinge is mutated to S |
| SEQ ID | SEQ ID NO:178 | IgG1 (IL-12 p35); |
| NO:12 | | Heterodimerization mutations: Q347R/D399V/F405T; |
| | | p35 substitutions: C74S, V185C; |
| | | Substitutions for reducing FcγR and C1q binding: L234A, |
| | | L235E, G237A, A330S, P331S; |
| | | C220 in the upper hinge is mutated to S |

Construct 120

| | | |
|---|---|---|
| SEQ ID NO:2 | SEQ ID NO:179 | IgG4 (IL-12 p40); |
| | | Heterodimerization mutations: K370E/R409W; |
| | | p40 substitution: Y292C (native disulfide bond between |
| | | subunits is preserved); |
| | | Substitution for preventing Fab-arm exchange and improving |
| | | thermostability: S228P |
| SEQ ID NO:3 | SEQ ID NO:180 | IgG4 (IL-12 p35); |
| | | Heterodimerization mutations: E357N/D399V/F405T; |
| | | p35 substitution: V185C (native disulfide bond between |
| | | subunits is preserved); |
| | | Substitution for preventing Fab-arm exchange and improving |
| | | thermostability: S228P; |

Construct 120-1

| | | |
|---|---|---|
| SEQ ID NO:2 | SEQ ID NO:181 | IgG4 (IL-12 p40); |
| | | Heterodimerization mutations: K360E/R409W; |
| | | p40 substitution: Y292C (native disulfide bond between |
| | | subunits is preserved); |
| | | Substitution for preventing Fab-arm exchange and improving |
| | | thermostability: S228P |
| SEQ ID NO:3 | SEQ ID NO:182 | IgG4 (IL-12 p35); |
| | | Heterodimerization mutations: Q347R/D399V/F405T; |
| | | p35 substitution: V185C (native disulfide bond between |
| | | subunits is preserved); |
| | | Substitution for preventing Fab-arm exchange and improving |
| | | thermostability: S228P |

Construct 120-2

| | | |
|---|---|---|
| SEQ ID NO:4 | SEQ ID NO:183 | IgG4 (IL-12 p40); |
| | | Heterodimerization mutations: K360E/R409W; |
| | | p40 substitution: Y292C (native disulfide bond between |
| | | subunits is preserved); |
| | | Substitution for preventing Fab-arm exchange and improving |
| | | thermostability: S228P; |
| | | Substitutions for reducing FcγR binding: S228P and L235E |
| SEQ ID NO:5 | SEQ ID NO: 184 | IgG4 (IL-12 p35); |
| | | Heterodimerization mutations: Q347R/D399V/F405T; |
| | | p35 substitution: V185C (native disulfide bond between |
| | | subunits is preserved); |
| | | Substitution for preventing Fab-arm exchange and improving |
| | | thermostability: S228P; |
| | | Substitutions for reducing FcγR binding: S228P and L235E |

Construct 120-3

| | | |
|---|---|---|
| SEQ ID NO:4 | SEQ ID NO:185 | IgG4 (IL-12 p40); |
| | | Heterodimerization mutations: K360E/R409W; |
| | | p40 substitution: Y292C (native disulfide bond between |
| | | subunits is preserved); |
| | | Substitution for preventing Fab-arm exchange and improving |
| | | thermostability: S228P; |
| | | Substitutions for reducing FcγR binding: S228P, L235E, |
| | | P329A |
| SEQ ID NO:5 | SEQ ID NO:186 | IgG4 (IL-12 p35); |
| | | Heterodimerization mutations: Q347R/D399V/F405T; |
| | | p35 substitution: V185C (native disulfide bond between |
| | | subunits is preserved); |
| | | Substitution for preventing Fab-arm exchange and improving |
| | | thermostability: S228P; |
| | | Substitutions for reducing FcγR binding: S228P, L235E, |
| | | P329A |

Construct 120-4

| | | |
|---|---|---|
| SEQ ID NO:7 | SEQ ID NO:187 | IgG1 (IL-12 p40); |
| OR | OR | Heterodimerization mutations: K360E/K409W; |
| SEQ ID | SEQ ID NO:273 | p40 substitution: Y292C (native disulfide bond between |
| NO:238 | | subunits is preserved); |
| | | C220 in the upper hinge is mutated to S |
| SEQ ID NO:8 | SEQ ID NO:188 | IgG1 (IL-12 p35); |
| | | Heterodimerization mutations: Q347R/D399V/F405T; |
| | | Substitution for stabilizing disulfide bond: S354C; |
| | | p35 substitution: V185C (native disulfide bond between |
| | | subunits is preserved); |
| | | C220 in the upper hinge is mutated to S |

Construct 120-5

| | | |
|---|---|---|
| SEQ ID NO:9 | SEQ ID NO:189 | IgG1 (IL-12 p40); |
| OR | OR | Heterodimerization mutations: K360E/K409W; |
| SEQ ID | SEQ ID NO:274 | p40 substitution: Y292C (native disulfide bond between |
| NO:239 | | subunits is preserved); |
| | | Substitutions for reducing FcγR binding: L234A, L235A; |
| | | C220 in the upper hinge is mutated to S |
| SEQ ID | SEQ ID NO:190 | IgG1 (IL-12 p35); |
| NO:10 | | Heterodimerization mutations: Q347R/D399V/F405T; |
| | | p35 substitution: V185C (native disulfide bond between |
| | | subunits is preserved); |
| | | Substitutions for reducing FcγR binding: L234A, L235A; |
| | | C220 in the upper hinge is mutated to S |

Construct 120-6

| | | |
|---|---|---|
| SEQ ID NO:9 | SEQ ID NO:191 | IgG1 (IL-12 p40); |
| OR | OR | Heterodimerization mutations: K360E/K409W; |
| SEQ ID | SEQ ID NO:275 | p40 substitution: Y292C (native disulfide bond between |
| NO:239 | | subunits is preserved); |
| | | Substitutions for reducing FcγR binding: L234A, L235A, |
| | | P329A; |
| | | C220 in the upper hinge is mutated to S |
| SEQ ID | SEQ ID NO:192 | IgG1 (IL-12 p35); |
| NO:10 | | Heterodimerization mutations: Q347R/D399V/F405T; |
| | | p35 substitution: V185C (native disulfide bond between |
| | | subunits is preserved); |
| | | Substitutions for reducing FcγR binding: L234A, L235A, |
| | | P329A; |
| | | C220 in the upper hinge is mutated to S |

Construct 120-7

| | | |
|---|---|---|
| SEQ ID | SEQ ID NO:193 | IgG1 (IL-12 p40); |
| NO:11 | OR | Heterodimerization mutations: K360E/K409W; |
| OR | SEQ ID NO:276 | p40 substitution: Y292C (native disulfide bond between |
| SEQ ID | | subunits is preserved); |
| NO:240 | | Substitutions for reducing FcγR and C1q binding: L234A, |
| | | L235E, G237A, A330S, P331S; |
| | | C220 in the upper hinge is mutated to S |
| SEQ ID | SEQ ID NO:194 | IgG1 (IL-12 p35); |
| NO:12 | | Heterodimerization mutations: Q347R/D399V/F405T; |
| | | p35 substitution: V185C (native disulfide bond between |
| | | subunits is preserved); |
| | | Substitutions for reducing FcγR and C1q binding: L234A, |
| | | L235E, G237A, A330S, P331S; |
| | | C220 in the upper hinge is mutated to S |

Construct 121

| | | |
|---|---|---|
| SEQ ID NO:9 | SEQ ID NO:195 | IgG1 (IL-12 p40); |
| OR | OR | Heterodimerization mutations: K360E/K409W; |
| SEQ ID | SEQ ID NO:277 | Substitution for stabilizing disulfide bond: Y349C; |
| NO:239 | | Substitutions for reducing FcγR binding: L234A, L235A; |
| | | Additional mutation in p40: Y292C to introduce IL-12 |
| | | stabilizing disulfide bond; |
| | | C220 in the upper hinge is mutated to S |
| SEQ ID | SEQ ID NO:196 | IgG1 (IL-12 p35); |
| NO:10 | | Heterodimerization mutations: Q347R/D399V/F405T; |
| | | Substitution for stabilizing disulfide bond: S354C; |
| | | Substitutions for reducing FcγR binding: L234A, L235A; |
| | | Additional mutation in p35: V185C to introduce IL-12 |
| | | stabilizing disulfide bond; |
| | | C220 in the upper hinge is mutated to S |

Construct 122

| | | |
|---|---|---|
| SEQ ID NO:9 | SEQ ID NO:197 | IgG1 (IL-12 p40); |
| OR | OR | Heterodimerization mutations: K360E/K409W; |
| SEQ ID | SEQ ID NO:278 | Substitution for stabilizing disulfide bond: Y349C; |
| NO:239 | | Substitutions for reducing FcγR binding: L234A, L235A, |
| | | P329A; |
| | | Additional mutation Y292C to introduce IL-12 stabilizing |
| | | disulfide bond; |
| | | C220 in the upper hinge is mutated to S |
| SEQ ID | SEQ ID NO:198 | IgG1 (IL-12 p35); |
| NO:10 | | Heterodimerization mutations: Q347R/D399V/F405T; |
| | | Substitution for stabilizing disulfide bond: S354C; |
| | | Substitutions for reducing FcγR binding: L234A, L235A, |
| | | P329A; |
| | | Additional mutation V185C to introduce IL-12 stabilizing |
| | | disulfide bond; |
| | | C220 in the upper hinge is mutated to S |

Construct 123

| | | |
|---|---|---|
| SEQ ID | SEQ ID NO:199 | IgG1 (IL-12 p40); |
| NO:11 | OR | Heterodimerization mutations: K360E/K409W; |
| OR | SEQ ID NO:279 | Substitution for stabilizing disulfide bond: Y349C; |
| SEQ ID | | Substitutions for reducing FcγR and C1q binding: L234A, |
| NO:240 | | L235E, G237A, A330S, P331S; |
| | | Additional mutation Y292C to introduce IL-12 stabilizing |
| | | disulfide bond; |
| | | C220 in the upper hinge is mutated to S |
| SEQ ID | SEQ ID NO:200 | IgG1 (IL-12 p35); |
| NO:12 | | Heterodimerization mutations: Q347R/D399V/F405T; |
| | | Substitution for stabilizing disulfide bond: S354C; |
| | | Substitutions for reducing FcγR and C1q binding: L234A, |
| | | L235E, G237A, A330S, P331S; |
| | | Additional mutation V185C to introduce IL-12 stabilizing |
| | | disulfide bond; |
| | | C220 in the upper hinge is mutated to S |

*The amino acid sequences can further comprise a lysine (K) at the C-terminus.

TABLE 5
Exemplary Dimeric Fc-fused Proteins

| | | |
|---|---|---|
| | Sequences of | |
| | Heterodimeric | Type of IgG (IL-12 subunit); |
| Linker | Fc-fused | mutations/ |
| Sequence | Proteins* | substitutions |

Construct 1

| | | |
|---|---|---|
| SEQ ID NO: 2 | SEQ ID NO: 17 | IgG4 (IL-12 p40); |
| | | Heterodimerization mutations: K370E/R409W; |
| | | Substitution for stabilizing disulfide bond: Y349C; |
| | | Substitution for preventing Fab-arm exchange and improving |
| | | thermostability: S228P |
| SEQ ID NO: 3 | SEQ ID NO: 18 | IgG4 (IL-12 p35); |
| | | Heterodimerization mutations: E357N/D399V/F405T; |
| | | Substitution for stabilizing disulfide bond: S354C; |
| | | Substitution for preventing Fab-arm exchange and improving |
| | | thermostability: S228P |

Construct 2

| | | |
|---|---|---|
| SEQ ID NO: 2 | SEQ ID NO: 19 | IgG4 (IL-12 p40); |
| | | Heterodimerization mutations: K360E/R409W; |
| | | Substitution for stabilizing disulfide bond: Y349C; |
| | | Substitution for preventing Fab-arm exchange and improving |
| | | thermostability: S228P |
| SEQ ID NO: 3 | SEQ ID NO: 20 | IgG4 (IL-12 p35); |
| | | Heterodimerization mutations: Q347R/D399V/F405T; |
| | | Substitution for stabilizing disulfide bond: S354C; |
| | | Substitution for preventing Fab-arm exchange and improving |
| | | thermostability: S228P |

Construct 3

| | | |
|---|---|---|
| SEQ ID NO: 4 | SEQ ID NO: 21 | IgG4 (IL-12 p40); |
| | | Heterodimerization mutations: K360E/R409W; |
| | | Substitution for stabilizing disulfide bond: Y349C; |
| | | Substitution for preventing Fab-arm exchange and improving |
| | | thermostability: S228P; |
| | | Substitutions for reducing FcyR binding: S228P and L235E |
| SEQ ID NO: 5 | SEQ ID NO: 22 | IgG4 (IL-12 p35); |
| | | Heterodimerization mutations: Q347R/D399V/F405T; |
| | | Substitution for stabilizing disulfide bond: S354C; |
| | | Substitution for preventing Fab-arm exchange and improving |
| | | thermostability: S228P; |
| | | Substitutions for reducing FcyR binding: S228P and L235E |

Construct 4

| | | |
|---|---|---|
| SEQ ID NO: 4 | SEQ ID NO: 23 | IgG4 (IL-12 p40); |
| | | Heterodimerization mutations: K360E/R409W; |
| | | Substitution for stabilizing disulfide bond: Y349C; |
| | | Substitution for preventing Fab-Arm exchange and improving |
| | | thermostability: S228P; |
| | | Substitutions for reducing FcyR binding: S228P, L235E, |
| | | P329A |
| SEQ ID NO: 5 | SEQ ID NO: 24 | IgG4 (IL-12 p35); |
| | | Heterodimerization mutations: Q347R/D399V/F405T; |
| | | Substitution for stabilizing disulfide bond: S354C; |
| | | Substitution for preventing Fab-Arm exchange and improving |
| | | thermostability: S228P; |
| | | Substitutions for reducing FcyR binding: S228P, L235E, |
| | | P329A |

Construct 5

| | | |
|---|---|---|
| SEQ ID NO: 4 | SEQ ID NO: 25 | IgG4 (IL-12 p40); |
| | | Heterodimerization mutations: K360E/R409W; |
| | | Substitution for stabilizing disulfide bond: Y349C; |
| | | Substitution for preventing Fab-Arm exchange and improving |
| | | thermostability: S228P; |
| | | Substitutions for reducing FcyR binding: S228P, L235E, |
| | | P329G |
| SEQ ID NO: 5 | SEQ ID NO: 26 | IgG4 (IL-12 p35); |
| | | Heterodimerization mutations: Q347R/D399V/F405T; |
| | | Substitution for stabilizing disulfide bond: S354C, |
| | | Substitution for preventing Fab-Arm exchange and improving |
| | | thermostability: S228P; |
| | | Substitutions for reducing FcyR binding: S228P, L235E, |
| | | P329G |

Construct 6

| | | |
|---|---|---|
| SEQ ID NO: 7 | SEQ ID NO: 27 | IgG1 (IL-12 p40); |
| | | Heterodimerization mutations: K360E/K409W; |
| | | Substitution for stabilizing disulfide bond: Y349C; |
| | | C220 in the upper hinge is mutated to S |
| SEQ ID NO: 8 | SEQ ID NO: 28 | IgG1 (IL-12 p35); |
| | | Heterodimerization mutations: Q347R/D399V/F405T; |
| | | Substitution for stabilizing disulfide bond: S354C; |
| | | C220 in the upper hinge is mutated to S |

Construct 7

| | | |
|---|---|---|
| SEQ ID NO: 9 | SEQ ID NO: 29 | IgG1FcSilent; |
| | | (IL-12 p40); |
| | | Heterodimerization mutations: K360E/K409W; |
| | | Substitution for stabilizing disulfide bond: Y349C; |
| | | Substitutions for reducing FcyR binding: L234A, L235A; |
| | | C220 in the upper hinge is mutated to S |
| SEQ ID NO: 10 | SEQ ID NO: 30 | IgG1FcSilent; |
| | | (IL-12 p35); |
| | | Heterodimerization mutations: Q347R/D399V/F405T; |
| | | Substitution for stabilizing disulfide bond: S354C; |
| | | Substitutions for reducing FcyR binding: L234A, L235A; |
| | | C220 in the upper hinge is mutated to S |

Construct 8

| | | |
|---|---|---|
| SEQ ID NO: 9 | SEQ ID NO: 31 | IgG1FcSilent; |
| | | (IL-12 p40); |
| | | Heterodimerization mutations: K360E/K409W; |
| | | Substitution for stabilizing disulfide bond: Y349C; |
| | | Substitutions for reducing FcyR binding: L234A, L235A, |
| | | P329A; |
| | | C220 in the upper hinge is mutated to S |
| SEQ ID NO: 10 | SEQ ID NO: 32 | IgG1FcSilent; |
| | | (IL-12 p35); |
| | | Heterodimerization mutations: Q347R/D399V/F405T; |
| | | Substitution for stabilizing disulfide bond: S354C; |
| | | Substitutions for reducing FcyR binding: L234A, L235A, |
| | | P329A; |
| | | C220 in the upper hinge is mutated to S |

Construct 9

| | | |
|---|---|---|
| SEQ ID NO: 9 | SEQ ID NO: 33 | IgG1FcSilent; |
| | | (IL-12 p40); |
| | | Heterodimerization mutations: K360E/K409W; |
| | | Substitution for stabilizing disulfide bond: Y349C; |
| | | Substitutions for |
| | | reducing FcyR binding: |
| | | L234A/L235A/P329G; |
| | | C220 in the upper hinge is mutated to S |
| SEQ ID NO: 10 | SEQ ID NO: 34 | IgG1FcSilent; |
| | | (IL-12 p35); |
| | | Heterodimerization mutations: Q347R/D399V/F405T; |
| | | Substitution for stabilizing disulfide bond: S354C; |
| | | Substitutions for reducing FcyR binding: L234A, L235A, |
| | | P329G; |
| | | C220 in the upper hinge is mutated to S |

Construct 10

| | | |
|---|---|---|
| SEQ ID NO: 11 | SEQ ID NO: 35 | IgG1 Fc; |
| | | (IL-12 p40); |
| | | Heterodimerization mutations: K360E/K409W; |
| | | Substitution for stabilizing disulfide bond: Y349C; |
| | | Substitutions for reducing FcyR and Clq binding: L234A, |
| | | L235E, G237A, A330S, P331S |
| SEQ ID NO: 12 | SEQ ID NO: 36 | IgG1 Fc; |
| | | (IL-12 p35); |
| | | Heterodimerization mutations: Q347R/D399V/F405T; |
| | | Substitution for stabilizing disulfide bond: S354C; |
| | | Substitutions for reducing FcyR and Clq binding: L234A, |
| | | L235E, G237A, A330S, P331S |

Construct 11

| | | |
|---|---|---|
| SEQ ID NO: 2 | SEQ ID NO: 37 | IgG4 Fc; |
| | | (IL-12 p40); |
| | | Heterodimerization mutations: K370E/R409W; |
| | | Substitution for stabilizing disulfide bond: Y349C; |
| | | Substitution for preventing Fab-Arm exchange and improving |
| | | thermostability: S228P |
| SEQ ID NO: 2 | SEQ ID NO: 38 | IgG4 Fc; |
| | | (IL-12 p35); |
| | | Heterodimerization mutations: E357N/D399V/F405T; |
| | | Substitution for stabilizing disulfide bond: S354C; |
| | | Substitution for preventing Fab-Arm exchange and improving |
| | | thermostability: S228P |

Construct 12

| | | |
|---|---|---|
| SEQ ID NO: 2 | SEQ ID NO: 39 | IgG4 Fc; |
| | | (IL-12 p40); |
| | | Heterodimerization mutations: K370E/R409W; |
| | | Substitution for stabilizing disulfide bond: Y349C; |
| | | Substitution for preventing Fab-Arm exchange and improving |
| | | thermostability: S228P |
| SEQ ID NO: 13 | SEQ ID NO: 40 | IgG4 Fc; |
| | | (IL-12 p35); |
| | | Heterodimerization mutations: E357N/D399V/F405T; |
| | | Substitution for stabilizing disulfide bond: S354C; |
| | | Substitution for preventing Fab-Arm exchange and improving |
| | | thermostability: S228P |

Construct 13

| | | |
|---|---|---|
| SEQ ID NO: 2 | SEQ ID NO: 41 | IgG4 Fc; |
| | | (IL-12 p40); |
| | | Heterodimerization mutations: K370E/R409W; |
| | | Substitution for stabilizing disulfide bond: Y349C; |
| | | Substitution for preventing Fab-Arm exchange and improving |
| | | thermostability: S228P |
| SEQ ID NO: 14 | SEQ ID NO: 42 | IgG4 Fc; |
| | | (IL-12 p35); |
| | | Heterodimerization mutations: E357N/D399V/F405T; |
| | | Substitution for stabilizing disulfide bond: S354C; |
| | | Substitution for preventing Fab-Arm exchange and improving |
| | | thermostability: S228P |

Construct 14

| | | |
|---|---|---|
| SEQ ID NO: 7 | SEQ ID NO: 43 | IgG1 Fc; |
| | | (IL-12 p40); |
| | | Heterodimerization mutations: K360E/K409W; |
| | | Substitution for stabilizing disulfide bond: Y349C; |
| | | C220 in the upper hinge is mutated to S |
| SEQ ID NO: 7 | SEQ ID NO: 44 | IgG1 Fc; |
| | | (IL-12 p35); |
| | | Heterodimerization mutations: Q347R/D399V/F405T; |
| | | Substitution for stabilizing disulfide bond: S354C; |
| | | C220 in the upper hinge is mutated to S |

Construct 15

| | | |
|---|---|---|
| SEQ ID NO: 7 | SEQ ID NO: 45 | IgG1 Fc; |
| | | (IL-12 p40); |
| | | Heterodimerization mutations: K360E/K409W; |
| | | Substitution for stabilizing disulfide bond: Y349C; |
| | | C220 in the upper hinge is mutated to S |
| SEQ ID NO: 15 | SEQ ID NO: 46 | IgG1 Fc; |
| | | (IL-12 p35); |
| | | Heterodimerization mutations: Q347R/D399V/F405T; |
| | | Substitution for stabilizing disulfide bond: S354C; |
| | | C220 in the upper hinge is mutated to S |

Construct 16

| | | |
|---|---|---|
| SEQ ID NO: 7 | SEQ ID NO: 47 | IgG1 Fc; |
| | | (IL-12 p40); |
| | | Heterodimerization mutations: K360E/K409W; |
| | | Substitution for stabilizing disulfide bond: Y349C; |
| | | C220 in the upper hinge is mutated to S |
| SEQ ID NO: 16 | SEQ ID NO: 48 | IgG1 Fc; |
| | | (IL-12 p35); |
| | | Heterodimerization mutations: Q347R/D399V/F405T; |
| | | Substitution for stabilizing disulfide bond: S354C; |
| | | C220 in the upper hinge is mutated to S |

Construct 17

| | | |
|---|---|---|
| SEQ ID NO: 8 | SEQ ID NO: 49 | IgG1 Fc; |
| | | (IL-12 p35); |
| | | Heterodimerization mutations: K360E/K409W; |
| | | Substitution for stabilizing disulfide bond: Y349C; |
| | | C220 in the upper hinge is mutated to S |
| SEQ ID NO: 7 | SEQ ID NO: 50 | IgG1 Fc; |
| | | (IL-12 p40); |
| | | Heterodimerization mutations: Q347R/D399V/F405T; |
| | | Substitution for stabilizing disulfide bond: S354C; |
| | | C220 in the upper hinge is mutated to S |

Construct 18

| | | |
|---|---|---|
| SEQ ID NO: 15 | SEQ ID NO: 51 | IgG1 (IL-12 p40); |
| | | Heterodimerization mutations: K360E/K409W; |
| | | Substitution for stabilizing disulfide bond: Y349C; |
| | | C220 in the upper hinge is mutated to S |
| SEQ ID NO: 15 | SEQ ID NO: 52 | IgG1 (IL-12 p35); |
| | | Heterodimerization mutations: Q347R/D399V/F405T; |
| | | Substitution for stabilizing disulfide bond: S354C; |
| | | C220 in the upper hinge is mutated to S |

Construct 19

| | | |
|---|---|---|
| SEQ ID NO: 15 | SEQ ID NO: 53 | IgG1 (IL-12 p40); |
| | | Heterodimerization mutations: K360E/K409W; |
| | | p40 substitutions: C177S, Y292C; |
| | | (native disulfide bond between subunits is deleted) |
| SEQ ID NO: 15 | SEQ ID NO: 54 | IgG1 (IL-12 p35); |
| | | Heterodimerization mutations: Q347R/D399V/F405T; |
| | | p35 substitutions: C74S V185C; |
| | | (native disulfide bond between subunits is deleted) |

Construct 19-1

| | | |
|---|---|---|
| SEQ ID NO: 2 | SEQ ID NO: 69 | IgG4 (IL-12 p40); |
| | | Heterodimerization mutations: K370E/R409W; |
| | | p40 substitutions: C177S, Y292C; |
| | | (native disulfide bond between subunits is deleted); |
| | | Substitution for preventing Fab-Arm exchange and improving |
| | | thermostability: S228P |
| SEQ ID NO: 3 | SEQ ID NO: 70 | IgG4 (IL-12 p35); |
| | | Heterodimerization mutations: E357N/D399V/F405T; |
| | | p35 substitutions: C74S V185C; |
| | | Substitution for preventing Fab-Arm exchange and improving |
| | | thermostability: S228P |

Construct 19-2

| | | |
|---|---|---|
| SEQ ID NO: 2 | SEQ ID NO: 71 | IgG4 (IL-12 p40); |
| | | Heterodimerization mutations: K360E/R409W; |
| | | p40 substitutions: C177S, Y292C; |
| | | (native disulfide bond between subunits is deleted); |
| | | Substitution for preventing Fab-Arm exchange and improving |
| | | thermostability: S228P |
| SEQ ID NO: 3 | SEQ ID NO: 72 | IgG4 (IL-12 p35); |
| | | Heterodimerization mutations: Q347R/D399V/F405T; |
| | | p35 substitutions: C74S V185C; |
| | | Substitution for preventing Fab-Arm exchange and improving |
| | | thermostability: S228P |

Construct 19-3

| | | |
|---|---|---|
| SEQ ID NO: 4 | SEQ ID NO: 73 | IgG4 (IL-12 p40); |
| | | Heterodimerization mutations: K360E/R409W; |
| | | p40 substitutions: C177S, Y292C; |
| | | (native disulfide bond between subunits is deleted); |
| | | Substitution for preventing Fab-Arm exchange and improving |
| | | thermostability: S228P; |
| | | Substitutions for reducing FcyR binding: S228P and L235E |
| SEQ ID NO: 5 | SEQ ID NO: 74 | IgG4 (IL-12 p35); |
| | | Heterodimerization mutations: Q347R/D399V/F405T; |
| | | p35 substitutions: C74S V185C; |
| | | Substitution for preventing Fab-Arm exchange and improving |
| | | thermostability: S228P; |
| | | Substitutions for reducing FcyR binding: S228P and L235E |

Construct 19-4

| | | |
|---|---|---|
| SEQ ID NO: 4 | SEQ ID NO: 75 | IgG4 (IL-12 p40); |
| | | Heterodimerization mutations: K360E/R409W; |
| | | p40 substitutions: C177S, Y292C; |
| | | (native disulfide bond between subunits is deleted); |
| | | Substitution for preventing Fab-Arm exchange and improving |
| | | thermostability: S228P; |
| | | Substitutions for reducing FcyR binding: S228P, L235E, |
| | | P329A |
| SEQ ID NO: 5 | SEQ ID NO: 76 | IgG4 (IL-12 p35); |
| | | Heterodimerization mutations: Q347R/D399V/F405T; |
| | | p35 substitutions: C74S V185C; |
| | | Substitution for preventing Fab-Arm exchange and improving |
| | | thermostability: S228P; |
| | | Substitutions for reducing FcyR binding: S228P, L235E, |
| | | P329A |

Construct 19-5

| | | |
|---|---|---|
| SEQ ID NO: 4 | SEQ ID NO: 77 | IgG4 (IL-12 p40); |
| | | Heterodimerization mutations: K360E/R409W; |
| | | p40 substitutions: C177S, Y292C; |
| | | (native disulfide bond between subunits is deleted); |
| | | Substitution for preventing Fab-Arm exchange and improving |
| | | thermostability: S228P; |
| | | Substitutions for reducing FcyR binding: S228P, L235E, |
| | | P329G |
| SEQ ID NO: 5 | SEQ ID NO: 78 | IgG4 (IL-12 p35); |
| | | Heterodimerization mutations: Q347R/D399V/F405T; |
| | | p35 substitutions: C74S V185C; |
| | | Substitution for preventing Fab-Arm exchange and improving |
| | | thermostability: S228P; |
| | | Substitutions for reducing FcyR binding: S228P, L235E, |
| | | P329G |

Construct 19-6

| | | |
|---|---|---|
| SEQ ID NO: 7 | SEQ ID NO: 79 | IgG1 (IL-12 p40); |
| | | Heterodimerization mutations: K360E/K409W; |
| | | p40 substitutions: C177S, Y292C; |
| | | (native disulfide bond between subunits is deleted); |
| | | C220 in the upper hinge is mutated to S |
| SEQ ID NO: 8 | SEQ ID NO: 80 | IgG1 (IL-12 p35); |
| | | Heterodimerization mutations: Q347R/D399V/F405T; |
| | | p35 substitutions: C74S V185C; |
| | | C220 in the upper hinge is mutated to S |

Construct 19-7

| | | |
|---|---|---|
| SEQ ID NO: 9 | SEQ ID NO: 81 | IgG1 (IL-12 p40); |
| | | Heterodimerization mutations: K360E/K409W; |
| | | p40 substitutions: C177S, Y292C; |
| | | (native disulfide bond between subunits is deleted); |
| | | Substitutions for reducing FcyR binding: L234A, L235A; |
| | | C220 in the upper hinge is mutated to S |
| SEQ ID NO: 10 | SEQ ID NO: 82 | IgG1 (IL-12 p35); |
| | | Heterodimerization mutations: Q347R/D399V/F405T; |
| | | p35 substitutions: C74S V185C; |
| | | Substitutions for reducing FcyR binding: L234A, L235A; |
| | | C220 in the upper hinge is mutated to S |

Construct 19-8

| | | |
|---|---|---|
| SEQ ID NO: 9 | SEQ ID NO: 83 | IgG1 (IL-12 p40); |
| | | Heterodimerization mutations: K360E/K409W; |
| | | p40 substitutions: C177S, Y292C; |
| | | (native disulfide bond between subunits is deleted); |
| | | Substitutions for reducing FcyR binding: L234A, L235A, |
| | | P329A; |
| | | C220 in the upper hinge is mutated to S |
| SEQ ID NO: 10 | SEQ ID NO: 84 | IgG1 (IL-12 p35); |
| | | Heterodimerization mutations: Q347R/D399V/F405T; |
| | | p35 substitutions: C74S, V185C; |
| | | Substitutions for reducing FcyR binding: L234A, L235A, |
| | | P329A; |
| | | C220 in the upper hinge is mutated to S |

Construct 19-9

| | | |
|---|---|---|
| SEQ ID NO: 9 | SEQ ID NO: 85 | IgG1 (IL-12 p40); |
| | | Heterodimerization mutations: K360E/K409W; |
| | | p40 substitutions: C177S, Y292C; |
| | | (native disulfide bond between subunits is deleted); |
| | | Substitutions for reducing FcyR binding: |
| | | L234A/L235A/P329G; |
| | | C220 in the upper hinge is mutated to S |
| SEQ ID NO: 10 | SEQ ID NO: 86 | IgG1 (IL-12 p35); |
| | | Heterodimerization mutations: Q347R/D399V/F405T; |
| | | p35 substitutions: C74S V185C; |
| | | Substitutions for reducing FcyR binding: L234A, L235A, |
| | | P329G; |
| | | C220 in the upper hinge is mutated to S |

Construct 19-10

| | | |
|---|---|---|
| SEQ ID NO: 11 | SEQ ID NO: 87 | IgG1 (IL-12 p40); |
| | | Heterodimerization mutations: K360E/K409W; |
| | | p40 substitutions: C177S, Y292C; |
| | | (native disulfide bond between subunits is deleted); |
| | | Substitutions for reducing FcyR and Clq binding: L234A, |
| | | L235E, G237A, A330S, P331S; |
| | | C220 in the upper hinge is mutated to S |
| SEQ ID NO: 12 | SEQ ID NO: 88 | IgG1 (IL-12 p35); |
| | | Heterodimerization mutations: Q347R/D399V/F405T; |
| | | p35 substitutions: C74S, V185C; |
| | | Substitutions for reducing FcyR and Clq binding: L234A, |
| | | L235E, G237A, A330S, P331S; |
| | | C220 in the upper hinge is mutated to S |

Construct 20

| | | |
|---|---|---|
| SEQ ID NO: 2 | SEQ ID NO: 55 | IgG4 (IL-12 p40); |
| | | Heterodimerization mutations: K370E/R409W; |
| | | p40 substitution: Y292C (native disulfide bond between |
| | | subunits is preserved); |
| | | Substitution for preventing Fab-Arm exchange and improving |
| | | thermostability: S228P |
| SEQ ID NO: 3 | SEQ ID NO: 56 | IgG4 (IL-12 p35); |
| | | Heterodimerization mutations: E357N/D399V/F405T; |
| | | p35 substitution: V185C (native disulfide bond between |
| | | subunits is preserved); |
| | | Substitution for preventing Fab-Arm exchange and improving |
| | | thermostability: S228P |

Construct 20-1

| | | |
|---|---|---|
| SEQ ID NO: 2 | SEQ ID NO: 89 | IgG4 (IL-12 p40); |
| | | Heterodimerization mutations: K360E/R409W; |
| | | p40 substitution: Y292C (native disulfide bond between |
| | | subunits is preserved); |
| | | Substitution for preventing Fab-Arm exchange and improving |
| | | thermostability: S228P |
| SEQ ID NO: 3 | SEQ ID NO: 90 | IgG4 (IL-12 p35); |
| | | Heterodimerization mutations: Q347R/D399V/F405T; |
| | | p35 substitution: V185C (native disulfide bond between |
| | | subunits is preserved); |
| | | Substitution for preventing Fab-Arm exchange and improving |
| | | thermostability: S228P |

Construct 20-2

| | | |
|---|---|---|
| SEQ ID NO: 4 | SEQ ID NO: 91 | IgG4 (IL-12 p40); |
| | | Heterodimerization mutations: K360E/R409W; |
| | | p40 substitution: Y292C (native disulfide bond between |
| | | subunits is preserved); |
| | | Substitution for preventing Fab-Arm exchange and improving |
| | | thermostability: S228P; |
| | | Substitutions for reducing FcyR binding: S228P and L235E |
| SEQ ID NO: 5 | SEQ ID NO: 92 | IgG4 (IL-12 p35); |
| | | Heterodimerization mutations: Q347R/D399V/F405T; |
| | | p35 substitution: V185C (native disulfide bond between |
| | | subunits is preserved); |
| | | Substitution for preventing Fab-Arm exchange and improving |
| | | thermostability: S228P; |
| | | Substitutions for reducing FcyR binding: S228P and L235E |

Construct 20-3

| | | |
|---|---|---|
| SEQ ID NO: 4 | SEQ ID NO: 93 | IgG4 (IL-12 p40); |
| | | Heterodimerization mutations: K360E/R409W; |
| | | p40 substitution: Y292C (native disulfide bond between |
| | | subunits is preserved); |
| | | Substitution for preventing Fab-Arm exchange and improving |
| | | thermostability: S228P; |
| | | Substitutions for reducing FcyR binding: S228P, L235E, |
| | | P329A |
| SEQ ID NO: 5 | SEQ ID NO: 94 | IgG4 (IL-12 p35); |
| | | Heterodimerization mutations: Q347R/D399V/F405T; |
| | | p35 substitution: V185C (native disulfide bond between |
| | | subunits is preserved); |
| | | Substitution for preventing Fab-Arm exchange and improving |
| | | thermostability: S228P; |
| | | Substitutions for reducing FcyR binding: S228P, L235E, |
| | | P329A |

Construct 20-4

| | | |
|---|---|---|
| SEQ ID NO: 4 | SEQ ID NO: 95 | IgG4 (IL-12 p40); |
| | | Heterodimerization mutations: K360E/R409W; |
| | | p40 substitution: Y292C (native disulfide bond between |
| | | subunits is preserved); |
| | | Substitution for preventing Fab-Arm exchange and improving |
| | | thermostability: S228P; |
| | | Substitutions for reducing FcyR binding: S228P, L235E, |
| | | P329G |
| SEQ ID NO: 5 | SEQ ID NO: 96 | IgG4 (IL-12 p35); |
| | | Heterodimerization mutations: Q347R/D399V/F405T; |
| | | p35 substitution: V185C (native disulfide bond between |
| | | subunits is preserved); |
| | | Substitution for preventing Fab-Arm exchange and improving |
| | | thermostability: S228P; |
| | | Substitutions for reducing FcyR binding: S228P, L235E, |
| | | P329G |

Construct 20-5

| | | |
|---|---|---|
| SEQ ID NO: 7 | SEQ ID NO: 97 | IgG1 (IL-12 p40); |
| | | Heterodimerization mutations: K360E/K409W; |
| | | p40 substitution: Y292C (native disulfide bond between |
| | | subunits is preserved); |
| | | C220 in the upper hinge is mutated to S |
| SEQ ID NO: 8 | SEQ ID NO: 98 | IgG1 (IL-12 p35); |
| | | Heterodimerization mutations: Q347R/D399V/F405T; |
| | | Substitution for stabilizing disulfide bond: S354C; |
| | | p35 substitution: V185C (native disulfide bond between |
| | | subunits is preserved); |
| | | C220 in the upper hinge is mutated to S |

Construct 20-6

| | | |
|---|---|---|
| SEQ ID NO: 9 | SEQ ID NO: 99 | IgG1 (IL-12 p40); |
| | | Heterodimerization mutations: K360E/K409W; |
| | | p40 substitution: Y292C (native disulfide bond between |
| | | subunits is preserved); |
| | | Substitutions for reducing FcyR binding: L234A, L235A; |
| | | C220 in the upper hinge is mutated to S |
| SEQ ID NO: 10 | SEQ ID | IgG1 (IL-12 p35); |
| | NO: 100 | Heterodimerization mutations: Q347R/D399V/F405T; |
| | | p35 substitution: V185C (native disulfide bond between |
| | | subunits is preserved); |
| | | Substitutions for reducing FcyR binding: L234A, L235A; |
| | | C220 in the upper hinge is mutated to S |

Construct 20-7

| | | |
|---|---|---|
| SEQ ID NO: 9 | SEQ ID | IgG1 (IL-12 p40); |
| | NO: 101 | Heterodimerization mutations: K360E/K409W; |
| | | p40 substitution: Y292C (native disulfide bond between |
| | | subunits is preserved); |
| | | Substitutions for reducing FcyR binding: L234A, L235A, |
| | | P329A; |
| | | C220 in the upper hinge is mutated to S |
| SEQ ID NO: 10 | SEQ ID | IgG1 (IL-12 p35); |
| | NO: 102 | Heterodimerization mutations: Q347R/D399V/F405T; |
| | | p35 substitution: V185C (native disulfide bond between |
| | | subunits is preserved); |
| | | Substitutions for reducing FcyR binding: L234A, L235A, |
| | | P329A; |
| | | C220 in the upper hinge is mutated to S |

Construct 20-8

| | | |
|---|---|---|
| SEQ ID NO: 9 | SEQ ID | IgG1 (IL-12 p40); |
| | NO: 103 | Heterodimerization mutations: K360E/K409W; |
| | | p40 substitution: Y292C (native disulfide bond between |
| | | subunits is preserved); |
| | | Substitutions for reducing FcyR binding: L234A, L235A, |
| | | P329G; |
| | | C220 in the upper hinge is mutated to S |
| SEQ ID NO: 10 | SEQ ID | IgG1 (IL-12 p35); |
| | NO: 104 | Heterodimerization mutations: Q347R/D399V/F405T; |
| | | p35 substitution: V185C (native disulfide bond between |
| | | subunits is preserved); |
| | | Substitutions for reducing FcyR binding: L234A, L235A, |
| | | P329G; |
| | | C220 in the upper hinge is mutated to S |

Construct 20-9

| | | |
|---|---|---|
| SEQ ID NO: 11 | SEQ ID | IgG1 (IL-12 p40); |
| | NO: 105 | Heterodimerization mutations: K360E/K409W; |
| | | p40 substitution: Y292C (native disulfide bond between |
| | | subunits is preserved); |
| | | Substitutions for reducing FcyR and Clq binding: L234A, |
| | | L235E, G237A, A330S, P331S; |
| | | C220 in the upper hinge is mutated to S |
| SEQ ID NO: 12 | SEQ ID | IgG1 (IL-12 p35); |
| | NO: 106 | Heterodimerization mutations: Q347R/D399V/F405T; |
| | | p35 substitution: V185C (native disulfide bond between |
| | | subunits is preserved); |
| | | Substitutions for reducing FcyR and Clq binding: L234A, |
| | | L235E, G237A, A330S, P331S; |
| | | C220 in the upper hinge is mutated to S |

Construct 21

| | | |
|---|---|---|
| SEQ ID NO: 9 | SEQ ID NO: 57 | IgG1 (IL-12 p40); |
| | | Heterodimerization mutations: K360E/K409W; |
| | | Substitution for stabilizing disulfide bond: Y349C; |
| | | Substitutions for reducing FcyR binding: L234A, L235A; |
| | | Additional mutation in p40: Y292C to introduce IL-12 |
| | | stabilizing disulfide bond; |
| | | C220 in the upper hinge is mutated to S |
| SEQ ID NO: 10 | SEQ ID NO: 58 | IgG1 (IL-12 p35); |
| | | Heterodimerization mutations: Q347R/D399V/F405T; |
| | | Substitution for stabilizing disulfide bond: S354C; |
| | | Substitutions for reducing FcyR binding: L234A, L235A; |
| | | Additional mutation in p35: V185C to introduce IL-12 |
| | | stabilizing disulfide bond; |
| | | C220 in the upper hinge is mutated to S |

Construct 22

| | | |
|---|---|---|
| SEQ ID NO: 9 | SEQ ID NO: 59 | IgG1 (IL-12 p40); |
| | | Heterodimerization mutations: K360E/K409W; |
| | | Substitution for stabilizing disulfide bond: Y349C; |
| | | Substitutions for reducing FcyR binding: L234A, L235A, |
| | | P329A; |
| | | Additional mutation Y292C to introduce IL-12 stabilizing |
| | | disulfide bond; |
| | | C220 in the upper hinge is mutated to S |
| SEQ ID NO: 10 | SEQ ID NO: 60 | IgG1 (IL-12 p35); |
| | | Heterodimerization mutations: Q347R/D399V/F405T; |
| | | Substitution for stabilizing disulfide bond: S354C; |
| | | Substitutions for reducing FcyR binding: L234A, L235A, |
| | | P329A; |
| | | Additional mutation V185C to introduce IL-12 stabilizing |
| | | disulfide bond; |
| | | C220 in the upper hinge is mutated to S |

Construct 23

| | | |
|---|---|---|
| SEQ ID NO: 11 | SEQ ID NO: 61 | IgG1 (IL-12 p40); |
| | | Heterodimerization mutations: K360E/K409W; |
| | | Substitution for stabilizing disulfide bond: Y349C; |
| | | Substitutions for reducing FcyR and Clq binding: L234A, |
| | | L235E, G237A, A330S, P331S; |
| | | Additional mutation Y292C to introduce IL-12 stabilizing |
| | | disulfide bond; |
| | | C220 in the upper hinge is mutated to S |
| SEQ ID NO: 12 | SEQ ID NO: 62 | IgG1 (IL-12 p35); |
| | | Heterodimerization mutations: Q347R/D399V/F405T; |
| | | Substitution for stabilizing disulfide bond: S354C; |
| | | Substitutions for reducing FcyR and Clq binding: L234A, |
| | | L235E, G237A, A330S, P331S; |
| | | Additional mutation V185C to introduce IL-12 stabilizing |
| | | disulfide bond; |
| | | C220 in the upper hinge is mutated to S |

*The amino acid sequences can further comprise a lysine (K) at the C-terminus.

[0214] (d) IL-12 subunits

[0215] IL-12 is a multisubunit protein including a p40 subunit and a p35 subunit. The amino acid sequence of mature wild-type IL-12 p40 is amino acids 23-328 of the GenBank Accession No. NP_002178.2, set forth in SEQ ID NO:127 below. The amino acid sequence of mature wild-type IL-12 p35 is amino acids 57-253 of GenBank Accession No. NP_000873.2, set forth in SEQ ID NO:128 below. The numbering of amino acid residues of p40 and p35 used herein corresponds to the mature wild-type protein sequences. As used herein, an IL-12 p40 subunit comprises an amino acid sequence at least 90% (e.g., at least 91%, 92%, 93%, 94%, 95%, 96%, 97%, 98%, or 99%) identical to SEQ ID NO:127. As used herein, an IL-12 p35 subunit comprises an amino acid sequence at least 90% (e.g., at least 91%, 92%, 93%, 94%, 95%, 96%, 97%, 98%, or 99%) identical to SEQ ID NO:128.

[0216] In certain embodiments of any one of the foregoing aspects, the p40 and p35 subunits of IL-12 comprise the amino acid sequences of SEQ ID NOs: 121 and 122; 127 and 128; 201 and 202; 203 and 204; 123 and 124; or 125 and 126, respectively. In certain embodiments, the first polypeptide comprises the amino acid sequence of a p40 subunit of IL-12, and the second polypeptide comprises the amino acid sequence of a p35 subunit of IL-12. In certain embodiments, the first polypeptide comprises the amino acid sequence of a p35 subunit of IL-12, and the second polypeptide comprises the amino acid sequence of a p40 subunit of IL-12.

[0217] In certain embodiments, the present disclosure includes a heterodimeric Fc-fused protein comprising: a first polypeptide comprising a first antibody Fc domain polypeptide and a second polypeptide comprising a second antibody Fc domain polypeptide, wherein the first polypeptide further comprises a first subunit of IL-12 fused to the first antibody Fc domain polypeptide by a linker; and a second, different subunit of IL-12 is fused to the second antibody Fc domain polypeptide, wherein the first and second, different subunits of IL-12 are bound to each other, wherein the first antibody Fc domain polypeptide and the second antibody Fc domain polypeptide each contain different mutations promoting heterodimerization, wherein the first antibody Fc domain polypeptide and the second antibody Fc domain polypeptide are bound to each other, and wherein the first subunit of IL-12 is a p40 subunit with a Y292C substitution, and the second, different subunit of IL-12 is a p35 subunit with a V185C substitution. In certain embodiments, the first subunit and second, different subunit of IL-12 comprise the amino acid sequences of SEQ ID NOs: 125 and 126, respectively.

[0218] The first subunit and second, different subunit of IL-12 can be fused to any of the antibody Fc domain polypeptides via any linkers disclosed herein to form Fc-fused proteins having sequences including but not limited to Constructs 120, 120-1, 120-2, 120-3, 120-4, 120-5, 120-6, and 120-7 as described in Table 4 and Constructs 20, 20-1, 20-2, 20-3, 20-4, 20-5, 20-6, 20-7, 20-8, and 20-9 as described in Table 5.

[0219] In certain embodiments, the p40 subunit of IL-12 further comprises a replacement of C177, and the p35 subunit of IL-12 further comprises a replacement of C74. In certain embodiments, C177 in the p40 subunit of IL-12 is replaced by S, and C74 in the p35 subunit of IL-12 is replaced by S. In certain embodiments, the p40 and p35 subunits of IL-12 comprise the amino acid sequences of SEQ ID NOs: 123 and 124, respectively.

[0220] The first subunit and second, different subunit of IL-12 can be fused to any of the antibody Fc domain polypeptides via any linkers disclosed herein to form Fc-fused proteins having sequences including but not limited to Constructs 119, 119-1, 119-2, 119-3, 119-4, 119-5, 119-6, 119-7, and 119-8 as described in Table 4, and Constructs 19, 19-1, 19-2, 19-3, 19-4, 19-5, 19-6, 19-7, 19-8, 19-9, and 19-10 as described in Table 5.

TABLE 6
Human IL-12 p40 and p35 amino acid sequences

| IL-12 p40 | IL-12 p35 |
|---|---|
| Human IL-12 p40 wild-type | Human IL-12 p35 wild-type |
| IWELKKDVYVVELDWYPDAPGEMVVLTCDTPEED | RNLPVATPDPGMFPCLHHSQNLLRAVSNMLQKAR |
| GITWTLDQSSEVLGSGKTLTIQVKEFGDAGQYTC | QTLEFYPCTSEEIDHEDITKDKTSTVEACLPLEL |
| HKGGEVLSHSLLLLHKKEDGIWSTDILKDQKEPK | TKNESCLNSRETSFITNGSCLASRKTSFMMALCL |
| NKTFLRCEAKNYSGRFTCWWLTTISTDLTFSVKS | SSIYEDLKMYQVEFKTMNAKLLMDPKRQIFLDQN |
| SRGSSDPQGVTCGAATLSAERVRGDNKEYEYSVE | MLAVIDELMQALNFNSETVPQKSSLEEPDFYKTK |
| CQEDSACPAAEESLPIEVMVDAVHKLKYENYTSS | IKLCILLHAFRIRAVTIDRVMSYLNAS |
| FFIRDIIKPDPPKNLQLKPLKNSRQVEVSWEYPD | (SEQ ID NO: 128) |
| TWSTPHSYFSLTFCVQVQGKSKREKKDRVFTDKT | |
| SATVICRKNASISVRAQDRYYSSSWSEWASVPCS | |
| (SEQ ID NO: 127) | |
| Human IL-12 p40 C177S Y292C | Human IL-12 p35 C74S V185C |
| SEQ ID NO: 201 | SEQ ID NO: 202 |
| Human IL-12 p40 Y292C | Human IL-12 p35 V185C |
| SEQ ID NO: 203 | SEQ ID NO: 204 |
| Human IL-12 p40 Q56R | Human IL-12 p35 E50V |
| SEQ ID NO: 121 | SEQ ID NO: 122 |
| Human IL-12 p40 Q56R C177S Y292C | Human IL-12 p35 E50V C74S V185C |
| SEQ ID NO: 123 | SEQ ID NO: 124 |
| Human IL-12 p40 Q56R Y292C | Human IL-12 p35 E50V V185C |
| SEQ ID NO: 125 | SEQ ID NO: 126 |

[0221] (e) Spacer peptides

[0222] Exemplary spacer peptide sequences are provided in Table 7, and exemplary full length linker sequences are provided in Tables 4 and 5.

[0223] Within the first polypeptide of the present invention, a first subunit of a multisubunit protein is fused via a linker to a first antibody Fc domain polypeptide (e.g., an IgG4 antibody Fc variant sequence or an IgG1 antibody Fc variant sequence, as disclosed in Table 2), in an amino-to-carboxyl direction. And within the second polypeptide of the present invention, a second, different subunit of a multisubunit protein is fused via a linker to a second antibody Fc domain polypeptide (e.g., an IgG4 antibody Fc variant sequence or an IgG1 antibody Fc variant sequence, as disclosed in Table 2), in an amino-to-carboxyl direction.

[0224] In some embodiments, the first subunit of a multisubunit protein of the present invention is fused via a linker to a first antibody Fc domain sequence, wherein the linker comprises or consists of a spacer peptide L₁ and the amino acid sequence of SEQ ID NO:1, 2, 4, 6, 7, 9, 11, 237, 238, 239, or 240. In some embodiments, the second, different subunit of the multisubunit protein is fused to a second antibody Fc domain polypeptide via a linker, wherein the linker comprises or consists of a spacer peptide L2 and the amino acid sequence of SEQ ID NO:1, 2, 4, 6, 7, 9, 11, 237, 238, 239, or 240.

[0225] In certain embodiments, L₁ and L₂ are peptide linkers, for example, L₁ and/or L₂ include(s) 4-50 amino acid residues. In certain embodiments, L₁ consists of 4-50 amino acid residues. In certain embodiments, L₁ consists of 4-20 amino acid residues. In certain embodiments, L₂ consists of 4-50 amino acid residues. In certain embodiments, L₂ consists of about 4-20 amino acid residues. In certain embodiments, L₁ and L₂ each independently consist of about 4-50 amino acid residues. In certain embodiments, L₁ and L₂ each independently consist of 4-20 amino acid residues.

[0226] In some embodiments, L₁ and L₂ have an optimized length and/or amino acid composition. In some embodiments, L₁ and L₂ are of the same length and have the same amino acid composition. In other embodiments, L₁ and L₂ are different.

[0227] In certain embodiments, L₁ is of equal number of amino acids to L₂; in certain embodiments L₁ is longer (i.e., more in the number of amino acids) than L₂; in certain embodiments L₁ is shorter (i.e., fewer number of amino acids) than L₂.

[0228] In certain embodiments, L₁ and/or L₂ are “short,” e.g., consist of 0, 1, 2, 3, 4, 5, 6, 7, 8, 9, 10, 11 or 12 amino acid residues. Thus, in certain instances, the spacer peptides consist of about 12 or fewer amino acid residues. In the case of 0 amino acid residues, the spacer peptide is a peptide bond. In certain embodiments, L₁ and/or L₂ are “long,” e.g., consist of 15, 20 or 25 amino acid residues. In some embodiments, the spacer peptides consist of about 3 to about 15, for example 8, 9 or 10 contiguous amino acid residues. Regarding the amino acid composition of L₁ and L₂, peptides are selected with properties that confer flexibility to first and the second polypeptides of the proteins of the present invention, do not interfere with the binding of the first and the second, different subunits to each other, as well as resist cleavage from proteases. For example, glycine and serine residues generally provide protease resistance. The spacer peptides suitable for linking the first subunit of the multisubunit protein to the amino acid sequence of SEQ ID NO:1, 2, 4, 6, 7, 9, 11, 237, 238, 239, or 240, and/or suitable for linking the second, different subunit of the multisubunit protein to the amino acid sequence of SEQ ID NO:1, 2, 4, 6, 7, 9, 11, 237, 238, 239, or 240 may include, as part of a linker, a (GS)ₙ, (GGS)ₙ, (GGGS)ₙ, (GGSG)ₙ, (GGSGG)ₙ, and (GGGGS)ₙ sequence, wherein n is 1, 2, 3, 4, 5, 6, 7, 8, 9, 10, 11, 12, 13, 14, 15, 16, 17, 18, 19, or 20. In some embodiments, L₁ and/or L₂ independently include a (GGGGS)₄ (SEQ ID NO:107) or (GGGGS)₃ (SEQ ID NO:108) sequence as part of a linker. In other embodiments, L₁ and/or L₂ independently include a peptide sequence, as part of a linker, as set forth in the sequences selected from: SEQ ID NO:111, 112, 113, 114, 115, 116, 117, 118, 119, and 120, as listed in Table 7. In some embodiments, L₁ and/or L₂ are independently SEQ ID NO:108, SEQ ID NO:109, or SEQ ID NO:110.

TABLE 7
Linkers

| Linker | SEQ ID NOs |
|---|---|
| G/S Linker | SEQ ID NOs: 111, 112, 113, 114, 115, 116, 117, |
| | 118, 119, and 120 |

[0229] In certain embodiments, L₁ includes a sequence, as part of a linker, SEQ ID NO:108, and L₂ includes, as part of a linker, SEQ ID NO:109, or SEQ ID NO:110. In certain embodiments, L₂ includes a sequence, as part of a linker, SEQ ID NO:108, and L₁ includes, as part of a linker, SEQ ID NO:109, or SEQ ID NO:110 sequence. In certain embodiments, L₁, as part of a linker, does not include a sequence as set forth in SEQ ID NO:107, 108, 109, 110, 111, 112, 113, 114, 115, 116, 117, 118, 119, or 120.

[0230] In certain embodiments, only L₂, as part of a linker, includes a sequence as set forth in SEQ ID NO:107, 108, 109, 110, 111, 112, 113, 114, 115, 116, 117, 118, 119, or 120. In certain embodiments, neither L₁ nor L₂, as part of a linker sequence, includes a sequence as set forth in SEQ ID NO:107, 108, 109, 110, 111, 112, 113, 114, 115, 116, 117, 118, 119, or 120.

[0231] Some heterodimeric Fc-fused proteins of the present invention comprise a first polypeptide comprising a first subunit of a multisubunit protein and a first antibody Fc domain polypeptide, in which a linker comprising SEQ ID NO: 118 connects the first subunit of a multisubunit protein to the first antibody Fc domain polypeptide, for example an Fc domain polypeptide of an IgG4 antibody or an Fc domain polypeptide of an IgG1 antibody. Some heterodimeric Fc-fused proteins of the present invention comprise a second polypeptide comprising a second, different subunit of a multisubunit protein and a second antibody Fc domain polypeptide, in which a linker comprising SEQ ID NO:118 connects the second, different subunit of a multisubunit protein to the second antibody Fc domain polypeptide, for example an Fc domain polypeptide of an IgG4 antibody or an Fc domain polypeptide of an IgG1 antibody.

[0232] In certain embodiments, some heterodimeric Fc-fused proteins of the present invention comprise a first polypeptide comprising a first subunit of a multisubunit protein and a first antibody Fc domain polypeptide, in which a linker comprising SEQ ID NO:118; connects the first subunit of a multisubunit protein to the Fc domain polypeptide, and a second polypeptide comprising a second, different subunit of a multisubunit protein and a second antibody Fc domain polypeptide, in which the additional subunit is connected to the second antibody Fc domain polypeptide with a linker that does not comprise SEQ ID NO:118.

[0233] In certain embodiments, some heterodimeric Fc-fused proteins of the present invention comprise a first polypeptide comprising a first subunit of a multisubunit protein and a first antibody Fc domain polypeptide, in which a linker that does not comprise SEQ ID NO:118 connects the first subunit of a multisubunit protein to the Fc domain polypeptide, and a second polypeptide comprising a second, different subunit of a multisubunit protein and a second antibody Fc domain polypeptide, in which the second, different subunit of a multisubunit protein is connected to the second antibody Fc domain polypeptide with a linker comprising SEQ ID NO:118.

[0234] Some heterodimeric Fc-fused proteins of the present invention comprise a first polypeptide comprising a first subunit of a multisubunit protein and a first antibody Fc domain polypeptide, in which a linker comprising SEQ ID NO: 109 connects the first subunit of a multisubunit protein to the first antibody Fc domain polypeptide, for example an Fc domain polypeptide of an IgG4 antibody or an Fc domain polypeptide of an IgG1 antibody. Some heterodimeric Fc-fused proteins of the present invention comprise a second polypeptide comprising a second, different subunit of a multisubunit protein and a second antibody Fc domain polypeptide, in which a linker comprising SEQ ID NO:109 connects the second, different subunit of a multisubunit protein to the second antibody Fc domain polypeptide, for example an Fc domain polypeptide of an IgG4 antibody or an Fc domain polypeptide of an IgG1 antibody.

[0235] Some heterodimeric Fc-fused proteins of the present disclosure include a linker comprising SEQ ID NO:109, which connects a first subunit of a multisubunit protein to a first antibody Fc domain polypeptide, for example an Fc domain polypeptide of an IgG4 antibody or an Fc domain polypeptide of an IgG1 antibody, and connects a second, different subunit of a multisubunit protein to a second antibody Fc domain polypeptide, for example an Fc domain polypeptide of an IgG4 antibody or an Fc domain polypeptide of an IgG1 antibody.

[0236] In certain embodiments, some heterodimeric Fc-fused proteins of the present invention comprise a first polypeptide comprising a first subunit of a multisubunit protein and a first antibody Fc domain polypeptide, in which a linker comprising SEQ ID NO:109 connects the first subunit of a multisubunit protein to the Fc domain polypeptide, and a second polypeptide comprising a second, different subunit of a multisubunit protein and a second antibody Fc domain polypeptide, in which additional subunit of a multisubunit protein is connected to the second antibody Fc domain polypeptide with a linker that does not comprise SEQ ID NO:109.

[0237] In certain embodiments, some heterodimeric Fc-fused proteins of the present invention comprise a first polypeptide comprising a first subunit of a multisubunit protein and a first antibody Fc domain polypeptide, in which a linker that does not comprise SEQ ID NO:109 connects the first subunit of a multisubunit protein to the Fc domain polypeptide, and a second polypeptide comprising a second, different subunit of a multisubunit protein and a second antibody Fc domain polypeptide, in which the second, different subunit of a multisubunit protein is connected to the second antibody Fc domain polypeptide with a linker comprising SEQ ID NO:109.

[0238] Some heterodimeric Fc-fused proteins of the present invention comprise a first polypeptide comprising a first subunit of a multisubunit protein and a first antibody Fc domain polypeptide, in which a linker comprising SEQ ID NO:110 connects the first subunit of a multisubunit protein to the first antibody Fc domain polypeptide, for example an Fc domain polypeptide of an IgG4 antibody or an Fc domain polypeptide of an IgG1 antibody. Some heterodimeric Fc-fused proteins of the present invention comprise a second polypeptide comprising a second, different subunit of a multisubunit protein and a second antibody Fc domain polypeptide, in which a linker comprising SEQ ID NO:110 connects the second, different subunit of a multisubunit protein to the second antibody Fc domain polypeptide, for example an Fc domain polypeptide of an IgG4 antibody or an Fc domain polypeptide of an IgG1 antibody.

[0239] Some heterodimeric Fc-fused proteins of the present disclosure include a linker comprising SEQ ID NO:110, which connects a first subunit of a multisubunit protein to a first antibody Fc domain polypeptide, for example an Fc domain polypeptide of an IgG4 antibody or an Fc domain polypeptide of an IgG1 antibody, and connects a second, different subunit of a multisubunit protein to a second antibody Fc domain polypeptide, for example an Fc domain polypeptide of an IgG4 antibody or an Fc domain polypeptide of an IgG1 antibody.

[0240] In certain embodiments, some heterodimeric Fc-fused proteins of the present invention comprise a first polypeptide comprising a first subunit of a multisubunit protein and a first antibody Fc domain polypeptide, in which a linker comprising SEQ ID NO:110 connects the first subunit of a multisubunit protein to the Fc domain polypeptide, and a second polypeptide comprising a second, different subunit of a multisubunit protein and a second antibody Fc domain polypeptide, in which the second, different subunit of a multisubunit protein is connected to the second antibody Fc domain polypeptide with a linker that does not comprise SEQ ID NO:110.

[0241] In certain embodiments, some heterodimeric Fc-fused proteins of the present invention comprise a first polypeptide comprising a first subunit of a multisubunit protein and a first antibody Fc domain polypeptide, in which a linker that does not comprise SEQ ID NO:110 connects the first subunit of a multisubunit protein to the Fc domain polypeptide, and a second polypeptide comprising a second, different subunit of a multisubunit protein and a second antibody Fc domain polypeptide, in which the second, different subunit of a multisubunit protein is connected to the second antibody Fc domain polypeptide with a linker comprising SEQ ID NO:110.

[0242] In certain embodiments, some heterodimeric Fc-fused proteins of the present invention comprise a first polypeptide comprising a first subunit of a multisubunit protein and a first antibody Fc domain polypeptide, in which a linker comprising SEQ ID NO:110 sequence connects the first subunit of a multisubunit protein to the Fc domain polypeptide, and a second polypeptide comprising a second, different subunit of a multisubunit protein and a second antibody Fc domain polypeptide, in which the second, different subunit of a multisubunit protein is connected to the second antibody Fc domain polypeptide with a linker comprising SEQ ID NO:109 sequence.

[0243] In certain embodiments, some heterodimeric Fc-fused proteins of the present invention comprise a first polypeptide comprising a first subunit of a multisubunit protein and a first antibody Fc domain polypeptide, in which a linker comprising SEQ ID NO:109 sequence connects the first subunit of a multisubunit protein to the Fc domain polypeptide, and a second polypeptide comprising a second, different subunit of a multisubunit protein and a second antibody Fc domain polypeptide, in which the second, different subunit of a multisubunit protein is connected to the second antibody Fc domain polypeptide with a linker comprising SEQ ID NO:110 sequence.
[0244] (f) Fc domain and substitutions for promoting heterodimerization

[0245] The assembly of proteins of the present invention can be accomplished by expressing a first polypeptide comprising a first subunit of a multisubunit protein sequence fused to a first antibody Fc domain polypeptide (e.g., an IgG4 antibody Fc variant sequence or an IgG1 antibody Fc variant sequence, as disclosed in Table 2), and a second polypeptide comprising a second, different subunit of a multisubunit protein sequence fused to a second antibody Fc domain polypeptide (e.g., an IgG4 antibody Fc variant sequence or an IgG1 antibody Fc variant sequence, as disclosed in Table 2) in the same cell, which leads to the assembly of a heterodimeric Fc-fused protein according to the invention. The assembled proteins have heterodimeric Fc domain polypeptides with the first antibody Fc domain polypeptide and the second antibody Fc domain polypeptide bound to each other. Promoting the preferential assembly of heterodimers of the Fc can be accomplished by incorporating different mutations in the CH3 domain of each antibody heavy chain constant region as shown in U.S. Ser. No. 13/494,870, U.S. Ser. No. 16/028,850, U.S. Ser. No. 11/533,709, U.S. Ser. No. 12/875,015, U.S. Ser. No. 13/289,934, U.S. Ser. No. 14/773,418, U.S. Ser. No. 12/811,207, U.S. Ser. No. 13/866,756, U.S. Ser. No. 14/647,480, and U.S. Ser. No. 14/830,336. For example, mutations can be made in the CH3 domain based on human IgG1 and incorporating distinct pairs of amino acid substitutions within a first antibody Fc domain polypeptide and a second antibody Fc domain polypeptide that allow these two chains to selectively heterodimerize with each other. The positions of amino acid substitutions illustrated below are all numbered according to the EU index as in Kabat.

[0246] In one scenario, an amino acid substitution in the first antibody Fc domain polypeptide replaces the original amino acid with a larger amino acid, selected from arginine (R), phenylalanine (F), tyrosine (Y) or tryptophan (W), and at least one amino acid substitution in the second antibody Fc domain polypeptide replaces the original amino acid(s) with a smaller amino acid(s), chosen from alanine (A), serine (S), threonine (T), or valine (V), such that the larger amino acid substitution (a protuberance) fits into the surface of the smaller amino acid substitutions (a cavity). For example, one antibody Fc domain polypeptide can incorporate a T366W substitution, and the other can incorporate three substitutions including T366S, L368A, and Y407V.

[0247] A first polypeptide comprising a first subunit of a multisubunit protein sequence or a second polypeptide comprising a second, different subunit of a multisubunit protein sequence of the invention can optionally be coupled to an amino acid sequence at least 90% (e.g., at least 91%, 92%, 93%, 94%, 95%, 96%, 97%, 98%, or 99%) identical to an antibody constant region, such as an IgG constant region including hinge, CH2 and CH3 domains with or without a CH1 domain. In some embodiments, the amino acid sequence of the constant region is at least 90% (e.g., at least 91%, 92%, 93%, 94%, 95%, 96%, 97%, 98%, or 99%) identical to a human antibody constant region, such as a human IgG1 constant region, an IgG2 constant region, an IgG3 constant region, or an IgG4 constant region. In some other embodiments, the amino acid sequence of the constant region is at least 90% (e.g., at least 91%, 92%, 93%, 94%, 95%, 96%, 97%, 98%, or 99%) identical to an antibody constant region from another mammal, such as rabbit, dog, cat, mouse, or horse. One or more mutation(s) can be incorporated into the constant region as compared to the human IgG1 constant region, for example at Q347, Y349, L351, S354, E356, E357, K360, Q362, S364, T366, L368, K370, N390, K392, T394, D399, S400, D401, F405, Y407, K409, T411 and/or K439. Exemplary substitutions include, for example, Q347E, Q347R, Y349S, Y349K, Y349T, Y349D, Y349E, Y349C, T350V, L351K, L351D, L351Y, S354C, E356K, E357Q, E357L, E357W, K360E, K360W, Q362E, S364K, S364E, S364H, S364D, T366V, T366I, T366L, T366M, T366K, T366W, T366S, L368E, L368A, L368D, K370S, N390D, N390E, K392L, K392M, K392V, K392F, K392D, K392E, T394F, T394W, D399R, D399K, D399V, S400K, S400R, D401K, F405A, F405T, Y407A, Y407I, Y407V, K409F, K409W, K409D, T411 D, T411E, K439D, and K439E.

[0248] In certain embodiments, mutations that can be incorporated into the CH1 of a human IgG1 constant region may be at amino acids V125, F126, P127, T135, T139, A140, F170, P171, and/or V173. In certain embodiments, mutations that can be incorporated into the Cx of a human IgG1 constant region may be at amino acids E123, F116, S176, V163, S174, and/or T164.

[0249] Amino acid substitutions could be selected from the following sets of substitutions shown in Table 8.

TABLE 8
Amino Acid Substitutions

| | First | Second |
|---|---|---|
| | Polypeptide | Polypeptide |
| Set 1 | S364E/F405A | Y349K/T394F |
| Set 2 | S364H/D401K | Y349T/T411E |
| Set 3 | S364H/T394F | Y349T/F405A |
| Set 4 | S364E/T394F | Y349K/F405A |
| Set 5 | S364E/T411E | Y349K/D401K |
| Set 6 | S364D/T394F | Y349K/F405A |
| Set 7 | S364H/F405A | Y349T/T394F |
| Set 8 | S364K/E357Q | L368D/K370S |
| Set 9 | L368D/K370S | S364K |
| Set 10 | L368E/K370S | S364K |
| Set 11 | K360E/Q362E | D401K |
| Set 12 | L368D/K370S | S364K/E357L |
| Set 13 | K370S | S364K/E357Q |
| Set 14 | F405L | K409R |
| Set 15 | K409R | F405L |

[0250] Alternatively, amino acid substitutions could be selected from the following sets of substitutions shown in Table 9.

TABLE 9
Amino Acid Substitutions

| | First Polypeptide | Second Polypeptide |
|---|---|---|
| Set 1 | K409W | D399V/F405T |
| Set 2 | Y349S | E357W |
| Set 3 | K360E | Q347R |
| Set 4 | K360E/K409W | Q347R/D399V/F405T |
| Set 5 | Q347E/K360E/K409W | Q347R/D399V/F405T |
| Set 6 | Y349S/K409W | E357W/D399V/F405T |

[0251] Alternatively, amino acid substitutions could be selected from the following set of substitutions shown in Table 10.

TABLE 10
Amino Acid Substitutions

| | First Polypeptide | Second Polypeptide |
|---|---|---|
| Set 1 | T366K/L351K | L351D/L368E |
| Set 2 | T366K/L351K | L351D/Y349E |
| Set 3 | T366K/L351K | L351D/Y349D |
| Set 4 | T366K/L351K | L351D/Y349E/L368E |
| Set 5 | T366K/L351K | L351D/Y349D/L368E |
| Set 6 | E356K/D399K | K392D/K409D |

[0252] Alternatively, at least one amino acid substitution in each polypeptide chain could be selected from Table 11.

TABLE 11
Amino Acid Substitutions

| First Polypeptide | Second Polypeptide |
|---|---|
| L351Y, D399R, D399K, S400K, | T366V, T366I, T366L, T366M, N390D, N390E, |
| S400R, Y407A, Y4071, Y407V | K392L, K392M, K392V, K392F K392D, K392E, |
| | K409F, K409W, T411D and T411E |

[0253] Alternatively, at least one amino acid substitutions could be selected from the following set of substitutions in Table 12, where the position(s) indicated in the First Polypeptide column is replaced by any known negatively-charged amino acid, and the position(s) indicated in the Second Polypeptide Column is replaced by any known positively-charged amino acid.

TABLE 12
Amino Acid Substitutions

| First Polypeptide | Second Polypeptide |
|---|---|
| K392, K370, K409, or K439 | D399, E356, or E357 |

[0254] Alternatively, at least one amino acid substitutions could be selected from the following set of in Table 13, where the position(s) indicated in the First Polypeptide column is replaced by any known positively-charged amino acid, and the position(s) indicated in the Second Polypeptide Column is replaced by any known negatively-charged amino acid.

TABLE 13
Amino Acid Substitutions

| First Polypeptide | Second Polypeptide |
|---|---|
| D399, E356, or E357 | K409, K439, K370, or K392 |

[0255] Alternatively, amino acid substitutions could be selected from the following set in Table 14.

TABLE 14
Amino Acid Substitutions

| First Polypeptide | Second Polypeptide |
|---|---|
| T350V, L351Y, F405A, | T350V, T366L, K392L, |
| and Y407V | and T394W |

[0256] Alternatively, or in addition, the structural stability of a heterodimeric Fc-fused protein according to the invention may be increased by introducing S354C on either of the first or second polypeptide chain, and Y349C on the opposing polypeptide chain, which forms an artificial disulfide bond within the interface of the two polypeptides.

[0257] In some embodiments, the amino acid sequence of one polypeptide chain of the antibody constant region differs from the amino acid sequence of an IgG1 constant region at position T366, and the amino acid sequence of the other polypeptide chain of the antibody constant region differs from the amino acid sequence of an IgG1 constant region at one or more position(s) selected from T366, L368 and Y407.

[0258] In some embodiments, the amino acid sequence of one polypeptide chain of the antibody constant region differs from the amino acid sequence of an IgG1 constant region at one or more position(s) selected from T366, L368 and Y407, and the amino acid sequence of the other polypeptide chain of the antibody constant region differs from the amino acid sequence of an IgG1 constant region at position T366.

[0259] In some embodiments, the amino acid sequence of one polypeptide chain of the antibody constant region differs from the amino acid sequence of an IgG1 constant region at one or more position(s) selected from E357, K360, Q362, S364, L368, K370, T394, D401, F405, and T411 and the amino acid sequence of the other polypeptide chain of the antibody constant region differs from the amino acid sequence of an IgG1 constant region at one or more position(s) selected from Y349, E357, S364, L368, K370, T394, D401, F405 and T411.

[0260] In some embodiments, the amino acid sequence of one polypeptide chain of the antibody constant region differs from the amino acid sequence of an IgG1 constant region at one or more position(s) selected from Y349, E357, S364, L368, K370, T394, D401, F405 and T411 and the amino acid sequence of the other polypeptide chain of the antibody constant region differs from the amino acid sequence of an IgG1 constant region at one or more position(s) selected from E357, K360, Q362, S364, L368, K370, T394, D401, F405, and T411.

[0261] In some embodiments, the amino acid sequence of one polypeptide chain of the antibody constant region differs from the amino acid sequence of an IgG1 constant region at one or more position(s) selected from L351, D399, S400 and Y407 and the amino acid sequence of the other polypeptide chain of the antibody constant region differs from the amino acid sequence of an IgG1 constant region at one or more position(s) selected from T366, N390, K392, K409 and T411.

[0262] In some embodiments, the amino acid sequence of one polypeptide chain of the antibody constant region differs from the amino acid sequence of an IgG1 constant region at one or more position(s) selected from T366, N390, K392, K409 and T411 and the amino acid sequence of the other polypeptide chain of the antibody constant region differs from the amino acid sequence of an IgG1 constant region at one or more position(s) selected from L351, D399, S400 and Y407.

[0263] In some embodiments, the amino acid sequence of one polypeptide chain of the antibody constant region differs from the amino acid sequence of an IgG1 constant region at one or more position(s) selected from Q347, Y349, K360, and K409, and the amino acid sequence of the other polypeptide chain of the antibody constant region differs from the amino acid sequence of an IgG1 constant region at one or more position(s) selected from Q347, E357, D399 and F405.

[0264] In some embodiments, the amino acid sequence of one polypeptide chain of the antibody constant region differs from the amino acid sequence of an IgG1 constant region at one or more position(s) selected from Q347, E357, D399 and F405, and the amino acid sequence of the other polypeptide chain of the antibody constant region differs from the amino acid sequence of an IgG1 constant region at one or more position(s) selected from Y349, K360, Q347 and K409.

[0265] In some embodiments, the amino acid sequence of one polypeptide chain of the antibody constant region differs from the amino acid sequence of an IgG1 constant region at one or more position(s) selected from K370, K392, K409 and K439, and the amino acid sequence of the other polypeptide chain of the antibody constant region differs from the amino acid sequence of an IgG1 constant region at one or more position(s) selected from D356, E357 and D399.

[0266] In some embodiments, the amino acid sequence of one polypeptide chain of the antibody constant region differs from the amino acid sequence of an IgG1 constant region at one or more position(s) selected from D356, E357 and D399, and the amino acid sequence of the other polypeptide chain of the antibody constant region differs from the amino acid sequence of an IgG1 constant region at one or more position(s) selected from K370, K392, K409 and K439.

[0267] In some embodiments, the amino acid sequence of one polypeptide chain of the antibody constant region differs from the amino acid sequence of an IgG1 constant region at one or more position(s) selected from L351, E356, T366 and D399, and the amino acid sequence of the other polypeptide chain of the antibody constant region differs from the amino acid sequence of an IgG1 constant region at one or more position(s) selected from Y349, L351, L368, K392 and K409.

[0268] In some embodiments, the amino acid sequence of one polypeptide chain of the antibody constant region differs from the amino acid sequence of an IgG1 constant region at one or more position(s) selected from Y349, L351, L368, K392 and K409, and the amino acid sequence of the other polypeptide chain of the antibody constant region differs from the amino acid sequence of an IgG1 constant region at one or more position(s) selected from L351, E356, T366 and D399.

[0269] In some embodiments, the amino acid sequence of one polypeptide chain of the antibody constant region differs from the amino acid sequence of an IgG1 constant region by an S354C substitution and the amino acid sequence of the other polypeptide chain of the antibody constant region differs from the amino acid sequence of an IgG1 constant region by a Y349C substitution.

[0270] In some embodiments, the amino acid sequence of one polypeptide chain of the antibody constant region differs from the amino acid sequence of an IgG1 constant region by a Y349C substitution and the amino acid sequence of the other polypeptide chain of the antibody constant region differs from the amino acid sequence of an IgG1 constant region by an S354C substitution.

[0271] In some embodiments, the amino acid sequence of one polypeptide chain of the antibody constant region differs from the amino acid sequence of an IgG1 constant region by K360E and K409W substitutions and the amino acid sequence of the other polypeptide chain of the antibody constant region differs from the amino acid sequence of an IgG1 constant region by 0347R, D399V and F405T substitutions.

[0272] In some embodiments, the amino acid sequence of one polypeptide chain of the antibody constant region differs from the amino acid sequence of an IgG1 constant region by 0347R, D399V and F405T substitutions and the amino acid sequence of the other polypeptide chain of the antibody constant region differs from the amino acid sequence of an IgG1 constant region by K360E and K409W substitutions.

[0273] In some embodiments, the amino acid sequence of one polypeptide chain of the antibody constant region differs from the amino acid sequence of an IgG1 constant region by a T366W substitutions and the amino acid sequence of the other polypeptide chain of the antibody constant region differs from the amino acid sequence of an IgG1 constant region by T366S, T368A, and Y407V substitutions.

[0274] In some embodiments, the amino acid sequence of one polypeptide chain of the antibody constant region differs from the amino acid sequence of an IgG1 constant region by T366S, T368A, and Y407V substitutions and the amino acid sequence of the other polypeptide chain of the antibody constant region differs from the amino acid sequence of an IgG1 constant region by a T366W substitution.

[0275] In some embodiments, the amino acid sequence of one polypeptide chain of the antibody constant region differs from the amino acid sequence of an IgG1 constant region by T350V, L351Y, F405A, and Y407V substitutions and the amino acid sequence of the other polypeptide chain of the antibody constant region differs from the amino acid sequence of an IgG1 constant region by T350V, T366L, K392L, and T394W substitutions.

[0276] In some embodiments, the amino acid sequence of one polypeptide chain of the antibody constant region differs from the amino acid sequence of an IgG1 constant region by T350V, T366L, K392L, and T394W substitutions and the amino acid sequence of the other polypeptide chain of the antibody constant region differs from the amino acid sequence of an IgG1 constant region by T350V, L351Y, F405A, and Y407V substitutions.

[0277] A skilled person in the art would appreciate that during production and/or storage of proteins, N-terminal glutamate (E) or glutamine (Q) can be cyclized to form a lactam (e.g., spontaneously or catalyzed by an enzyme present during production and/or storage). Accordingly, in some embodiments where the N-terminal residue of an amino acid sequence of a polypeptide is E or Q, a corresponding amino acid sequence with the E or Q replaced with pyroglutamate is also contemplated herein.

[0278] A skilled person in the art would also appreciate that during protein production and/or storage, the C-terminal lysine (K) of a protein can be removed (e.g., spontaneously or catalyzed by an enzyme present during production and/or storage). Such removal of K is often observed with proteins that comprise a Fc domain at its C-terminus. Accordingly, in some embodiments where the C-terminal residue of an amino acid sequence of a polypeptide (e.g., a Fc domain sequence) is K, a corresponding amino acid sequence with the K removed is also contemplated herein.
[0279] (g) Mutations for reducing effector functions

[0280] In one aspect, the present invention provides a heterodimeric Fc-fused protein comprising (a) a first polypeptide comprising a first antibody Fc domain polypeptide and a first subunit of a multisubunit protein; and (b) a second polypeptide comprising a second antibody Fc domain polypeptide and a second, different subunit of the multisubunit protein, wherein the first and second antibody Fc domain polypeptides each comprise different mutations promoting heterodimerization, wherein the first and/or second antibody Fc domain polypeptides comprise one or more mutation(s) that reduce(s) an effector function of an Fc, and wherein the first subunit and second, different subunit of the multisubunit protein are bound to each other. In certain embodiments, a heterodimeric Fc-fused protein disclosed herein comprising one or more mutation(s) that reduce(s) an effector function of an Fc has an increased activity to inhibit tumor growth than its counterpart without the Fc mutation(s) that reduce(s) the effector function. The mutations contemplated herein include substitution, insertion, and deletion of amino acid residues. All the amino acid positions in an Fc domain or hinge region disclosed herein are numbered according to EU numbering.

[0281] In certain embodiments, the first and/or second antibody Fc domain polypeptides comprise one or more mutation(s) that reduce(s) the ability of the Fc domain polypeptide to induce antibody-dependent cellular cytotoxicity (ADCC) and/or antibody-dependent cellular phagocytosis (ADCP). ADCC and ADCP are typically mediated by an Fc receptor. For example, in certain embodiments, the first and second antibody Fc domain polypeptides are human IgG (e.g., human IgG1, human IgG2, human IgG3, or human IgG4) antibody sequences. The Fc receptors of human IgG, also called Fc gamma receptors (FcγRs), include but are not limited to activating Fc gamma receptors FcγRI (CD64), FcγRIIA (CD32A), FcγRIIIA (CD16 or CD16A), and FcγRIIIB (CD16B), and inhibitor Fc gamma receptor FcγRIIB (CD32B). Accordingly, in some embodiments, a heterodimeric Fc-fused protein of the present invention includes one or more mutation(s) to reduce binding to an activating FcγR (e.g., FcγRI, FcγRIIA, FcγRIIIA, or FcγRIIIB) in the first and/or second polypeptides. In some embodiments, a heterodimeric Fc-fused protein of the present invention includes one or more mutation(s) to increase binding to an inhibitory FcγR (e.g., FcγRIIB) in the first and/or second polypeptides.

[0282] Fc mutations that reduce binding to an activating FcγR and/or increase binding to an inhibitory FcγR are known in the art. For example, within the hinge and Fc regions, CD16 binding is mediated by the hinge region and the CH2 domain. For example, within human IgG1, the interaction with CD16 is primarily focused on amino acid residues Asp 265-Glu 269, Asn 297-Thr 299, Ala 327-Ile 332, Leu 234-Ser 239, and carbohydrate residue N-acetyl-D-glucosamine in the CH2 domain (see, Sondermann et al, Nature, 406 (6793):267-273). Based on the known domains, mutations can be selected to enhance or reduce the binding affinity to CD16, such as by using phage-displayed libraries or yeast surface-displayed cDNA libraries, or can be designed based on the known three-dimensional structure of the interaction.

[0283] As reviewed in Want et al., Protein Cell (2018) 9(1):63-73, the regions including amino acid positions 232-239, 265-270, 296-299, and 325-332 are implicated in activating FcγR binding according to a crystal structure of human IgG1 Fc. Wang et al. also discloses that L235E and F234A/L235A mutations of human IgG4, L234A/L235A mutations of human IgG1, and N297 mutations (e.g., N297A, N297Q, N297G, or N297D) of IgG antibodies reduce activating FcγR binding. As disclosed in U.S. Pat. No. 8,969,526, mutation at position 329 (e.g., P329A, P329G, or P329R) also reduces activating FcγR binding. Additional amino acid positions and mutations (e.g., E233P mutation) implicated in activating FcγR binding are disclosed in U.S. Pat. No. 7,943,743 and Isaacs et al., J. Immunol. (1998) 161:3862-69.

[0284] Accordingly, in certain embodiments, the first and second antibody Fc domain polypeptides comprise a mutation (e.g., substitution relative to wild-type human IgG1) at one or more of positions selected from 233, 234, 235, 297, and 329. In certain embodiments, the first and second antibody Fc domain polypeptides are human IgG1 antibody Fc domain polypeptides comprising mutation(s) E233P; L234A (human IgG1) or F234A (human IgG4); L235A or L235E; N297A, N297Q, N297G, or N297D; and/or P329A, P329G, or P329R. In certain embodiments, the first and second antibody Fc domain polypeptides are human IgG1 antibody Fc domain polypeptides comprising mutations L234A and L235A. In certain embodiments, the first and second antibody Fc domain polypeptides are human IgG1 antibody Fc domain polypeptides comprising mutations L234A, L235A, and P329A. In certain embodiments, the first and second antibody Fc domain polypeptides are human IgG4 antibody Fc domain polypeptides comprising mutation L235E. In certain embodiments, the first and second antibody Fc domain polypeptides are human IgG1 antibody Fc domain polypeptides comprising mutations L235E and P329A.

[0285] In certain embodiments, the first and/or second antibody Fc domain polypeptides comprise one or more mutation(s) that reduce(s) the ability of the Fc domain polypeptide to induce complement dependent cytotoxicity (CDC). CDC is typically mediated by a complement component (e.g., C1q). Accordingly, in certain embodiments, a heterodimeric Fc-fused protein of the present invention includes one or more mutation(s) to reduce binding to a complement component (e.g., C1q) in the first and/or second polypeptides.

[0286] Fc mutations that reduce binding to C1q are known in the art. For example, as disclosed in U.S. Pat. Nos. 5,648,260 and 5,624,821, the amino acid residues of Fc at positions 234, 235, 236, 237, 297, 318, 320, and 322 are implicated in C1q binding. As disclosed in Tao et al., J. Exp. Med. (1993) 178:661-667 and Brekke et al., Eur. J. Immunol. (1994) 24:2542-47, residue Pro at position 331 is implicated in C1q binding. As disclosed in Idusogie et al., J. Immunol. (2000) 164:4178-84, mutations of Fc at positions 270 (e.g., D270A), 322 (K322A), 329 (e.g., P329A), and 331 (e.g., P331A, P331S, or P331G) reduced C1q binding.

[0287] Accordingly, in certain embodiments, the first and second antibody Fc domain polypeptides comprise a mutation (e.g., substitution relative to wild-type human IgG1) at one or more of positions selected from 234, 235, 236, 237, 270, 297, 318, 320, 322, 329, and 331. In certain embodiments, the first and second antibody Fc domain polypeptides are human IgG1 antibody Fc domain polypeptides comprising mutation(s) G237A, A330S, P331S, and/or P329A. In certain embodiments, the first and second antibody Fc domain polypeptides are human IgG1 antibody Fc domain polypeptides comprising mutations G237A, A330S, and P331S. In certain embodiments, the first and second antibody Fc domain polypeptides are human IgG1 antibody Fc domain polypeptides comprising mutation P329A.

[0288] The mutations that reduce ADCC and/or ADCP and the mutations that reduce CDC can be combined. In certain embodiments, the first and/or second antibody Fc domain polypeptides comprise one or more mutation(s) that reduce(s) the ability of the Fc domain polypeptide to induce ADCC and/or ADCP and further comprise one or more mutation(s) that reduce(s) the ability of the Fc domain polypeptide to induce CDC. In certain embodiments, the first and second antibody Fc domain polypeptides each comprise one or more mutation(s) that reduce(s) the ability of the Fc domain polypeptide to induce ADCC and/or ADCP and further comprise one or more mutation(s) that reduce(s) the ability of the Fc domain polypeptide to induce CDC.

[0289] In some embodiments, a heterodimeric Fc-fused protein of the present invention with an IgG4 Fc includes one or more mutation(s) to reduce binding to an FcγR (e.g., FcγRI, FcγRIIA, FcγRIIB, FcγRIIIA, or FcγRIIIB) or a complement component (e.g., C1q) in the first and/or second polypeptides. Such mutations are useful for reducing effector functions. For example, a protein of the present disclosure can include S228P and L235E mutations; S228P, L235E, and P329A mutations; or S228P, L235E, and P329G mutations.

[0290] In some embodiments, a heterodimeric Fc-fused protein of the present invention with an IgG1 Fc includes one or more mutation(s) to reduce binding to an FcγR (e.g., FcγRI, FcγRIIA, FcγRIIB, FcγRIIIA, or FcγRIIIB) or a complement component (e.g., C1q) in the first and/or second polypeptides. Such mutations are useful for reducing effector functions. For example, a protein of the present disclosure can include L234A and L235A mutations; L234A, L235A, and P329A mutations; L234A, L235A, and P329G mutations; or L234A, L235E, G237A, A330S, and P331S mutations.

[0291] In some embodiments, a heterodimeric Fc-fused protein according to the invention includes a first antibody IgG4 or IgG1 Fc domain polypeptide and a second antibody IgG4 or IgG1 Fe domain polypeptide each containing the mutation P329G or P329A.

[0292] In some embodiments, the first antibody Fe domain polypeptide and the second antibody Fe domain polypeptide each contain a mutation selected from A330S and P331S.

[0293] In some embodiments, the first antibody Fe domain polypeptide and the second antibody Fe domain polypeptide each contain the mutations A330S and P331S.

[0294] In certain embodiments, in the first polypeptide of the heterodimeric Fc-fused protein of the present invention, the first subunit of the multisubunit protein is fused to the first antibody Fe domain polypeptide by a first linker. In certain embodiments, in the second polypeptide of the heterodimeric Fc-fused protein of the present invention, the second, different subunit of the multisubunit protein is fused to the second antibody Fe domain polypeptide by a second linker. Amino acid sequences of linkers suitable for such use are described under the headings “IgG4 constructs” and “IgG1 constructs.” Additional linker sequences suitable for use in the first and/or second polypeptides include but are not limited to wild-type IgG (e.g., human IgG1, human IgG2, human IgG3, or human IgG4) hinge sequences and mutant forms thereof. For example, in certain embodiments, the first and second linkers each comprise amino acid sequence ESKYGPPCPPCPAPEFXGG, wherein X is L or E (SEQ ID NO:280) or SKYGPPCPPCPAPEFXGG, wherein X is L or E (SEQ ID NO:281). In certain embodiments, the first and second linkers each comprise amino acid sequence of SEQ ID NO:282 or of SEQ ID NO:283. In certain embodiments, the first and second linkers each comprise amino acid sequence of SEQ ID NO:284 or of SEQ ID NO:285.
[0295] (h) Serum Half-life

[0296] Heterodimeric Fc-fused proteins according to the invention have pharmacokinetic properties suitable for therapeutic use. For example, in certain embodiments, a heterodimeric Fc-fused protein according to the invention has a serum half-life of at least about 50 hours. In certain embodiments, a heterodimeric Fc-fused protein according to the invention has a serum half-life of at least about 100 hours.

[0297] In certain embodiments, 50 hours after intravenous administration to a subject, the serum concentration of the heterodimeric Fc-fused protein according to the invention is at least 10% of the serum concentration of the protein of the present invention 1 hour after the administration in said subject.

[0298] In certain embodiments, a heterodimeric Fc-fused protein according to the invention has a serum half-life that is at least 20%, 30%, 40%, 50%, 60%, 70%, 80%, or 90% longer than the multisubunit protein not fused to Fc domain polypeptides. In certain embodiments, a heterodimeric Fc-fused protein comprising a protein sequence of a multisubunit protein according to the present invention has a serum half-life that is at least 2-fold, 3-fold, 4-fold, 5-fold, 6-fold, 7-fold, 8-fold, 9-fold, 10-fold, 15-fold, or 20-fold longer than the multisubunit protein not fused to Fc domain polypeptides.
[0299] (i) Tumor Retention

[0300] Heterodimeric Fc-fused proteins of the invention can optionally incorporate additional features to enhance retention of the proteins at the tumor site. For example, in certain embodiments of the present invention, the heterodimeric Fc-fused protein further comprises a proteoglycan-binding domain, a collagen-binding domain, and/or a hyaluronic acid-binding domain. In certain embodiments, the heterodimeric Fc-fused protein further comprises a proteoglycan-binding domain that binds one or more proteoglycans (e.g., proteoglycans known in the art, e.g., as disclosed in Lozzo et al., Matrix Bio (2015) 42:11-55; and Nikitovic et al., Frontiers in Endocrinology (2018) 9:69) that are present in a tumor (e.g., on the surface of a tumor cell, in a pericellular matrix in a tumor, or in a extracellular matrix in a tumor). In certain embodiments, the collagen-binding domain binds one or more collagens that are present in a tumor (e.g., on the surface of a tumor cell, in a pericellular matrix in a tumor, or in a extracellular matrix in a tumor). In certain embodiments, the heterodimeric Fc-fused protein further comprises a h acid-binding domain that binds to one or more hyaluronic acid that are present in a tumor. Such heterodimeric Fc-fused proteins have enhanced retention in tumors and may be administered to a subject intratumorally at a lower dose and/or frequency.

[0301] In certain embodiments, the proteoglycan-binding domain comprised in the heterodimeric Fc-fused protein binds one or more proteoglycans that are specifically expressed in a tumor (e.g., on the surface of a tumor cell, in a pericellular matrix in a tumor, or in a extracellular matrix in a tumor). In certain embodiments, the collagen-binding domain comprised in the heterodimeric Fc-fused protein binds one or more collagens that are specifically expressed in a tumor (e.g., on the surface of a tumor cell, in a pericellular matrix in a tumor, or in a extracellular matrix in a tumor). Such heterodimeric Fc-fused proteins may be enriched in tumors after administration (e.g., intravenous, subcutaneous, or pulmonary administration) and have enhanced tumor retention, thereby allowing administration at a lower dose and/or frequency.

[0302] In certain embodiments, the heterodimeric Fc-fused protein of the present invention further comprises a proteoglycan-binding domain that binds one or more proteoglycans selected from syndecan, chondroitin sulfate proteoglycan 4 (CSPG4), betaglycan, phosphacan, glypican, perlecan, agrin, collagen (e.g., collagen IX, XII, XV, or XVIII), hyalectan, aggrecan, versican, neurocan, brevican, and a small leucine-rich proteoglycan (SLRP). Proteoglycans implicated in cancer include but are not limited to collagen, syndecan (e.g., syndecan-1 or syndecan-2), serglycin, CSPG4, betaglycan, glypican (e.g., glypican-1 or glypican-3), perlecan, versican, brevican, and SLPR (e.g., decorin, biglycan, asporin, fibrodulin, and lumican). Accordingly, in certain embodiments, the proteoglycan-binding domain comprised in the heterodimeric Fc-fused protein binds one or more proteoglycans selected from syndecan (e.g., syndecan-1 or syndecan-2), serglycin, CSPG4, betaglycan, glypican (e.g., glypican-1 or glypican-3), perlecan, versican, brevican, and a SLPR. In certain embodiments, the proteoglycan-binding domain comprised in the heterodimeric Fc-fused protein binds one or more SLPRs selected from decorin, biglycan, asporin, fibrodulin, and lumican.

[0303] The proteoglycan-binding domain comprised in the heterodimeric Fc-fused protein can be a protein (e.g., an antibody or an antigen-binding fragment thereof), a peptide (e.g., a portion of a proteoglycan-binding protein or a variant thereof), an aptamer, a small molecule, or a combination thereof. Proteoglycan-binding domains are also known in the art. For example, syndecan-binding domains are disclosed in U.S. Pat. Nos. 6,566,489, 8,647,828, and 10,124,038; U.S. Patent Application Publication No. 2009/0297479; and PCT Patent Application Publication No. WO2018199176A1. CSPG4-binding domains are disclosed in U.S. Pat. Nos. 9,801,928 and 10,093,745; and U.S. Patent Application Publication Nos. 2016/0032007, 2017/0342151, and 2018/0072811. β-glycan-binding domains are disclosed in U.S. Pat. No. 7,455,839. Glypican-binding domains are disclosed in U.S. Pat. Nos. 7,919,086, 7,776,329, 8,680,247, 8,388,937, 9,260,492, 9,394,364, 9,790,267, 9,522,940, and 9,409,994; U.S. Patent Application Publication Nos. 2004/0236080, 2011/0123998, 2018/0244805, 2018/0230230, and 2018/0346592; European Patent No. 2270509; and PCT Patent Application Publication No. WO2017053619A1, WO2018026533A1, WO2018165344A1, and WO2018199318A1. Perlecan-binding domains are disclosed in U.S. Pat. No. 10,166,304. Decorin-binding domains are disclosed in U.S. Pat. No. 6,517,838 and PCT Patent Application Publication No. WO2000021989A1, WO2000077041A2, and WO2000078800A2.

[0304] In certain embodiments, the heterodimeric Fc-fused protein of the present invention further comprises a collagen-binding domain. Collagen is a class of proteins having at least 28 different types identified in vertebrates. Each type of collagen has its unique structural characteristics and distribution pattern, as disclosed in Fang et al., Tumor Biol. (2014) 35:2871-82 and Xiong et al., J. Cancer Metasta. Treat. (2016) 2:357-64. Various types of collagens are implicated in cancer, including but not limited to Col3A1, Col5A2, Col6, Col7A1, Col15A1 Col19A1, and Col22A1. The collagen-binding domain can be a protein (e.g., an antibody or an antigen-binding fragment thereof), a peptide (e.g., a portion of a collagen-binding protein or a variant thereof), an aptamer, a small molecule, or a combination thereof. Collagen-binding domains are known in the art, and are disclosed in, for example, U.S. Pat. Nos. 5,788,966, 5,587,360, 5,851,794, 5,741,670, 5,849,701, 6,288,214, 6,387,663, 6,908,994, 7,169,902, 7,488,792, 7,820,401, 8,956,612, 8,642,728, and 8,906,649, and U.S. Patent Application Publication Nos. 2007/0161062, 2009/0142345, and 2012/0100106.

[0305] In certain embodiments, the heterodimeric Fc-fused protein of the present invention further comprises a hyaluronic acid-binding domain. The hyaluronic acid-binding domain can be a protein (e.g., an antibody or an antigen-binding fragment thereof), a peptide (e.g., a portion of a hyaluronic acid-binding protein or a variant thereof), an aptamer, a small molecule, or a combination thereof. Hyaluronic acid-binding domains are known in the art, and are disclosed in, for example, U.S. Pat. Nos. 6,864,235, 8,192,744, 8,044,022, 8,163,498, 8,034,630, 9,217,016, 9,795,686, and 9,751,919, and U.S. Patent Application Publication Nos. 2002/0055488 and 2007/0259380.

[0306] A proteoglycan-binding domain, collagen-binding domain, and/or hyaluronic acid-binding domain, if present, can be at any position of the heterodimeric Fc-fused protein. For example, in certain embodiments, where the IL-12 subunits are positioned N-terminal to the antibody Fc domain polypeptides, a proteoglycan-binding domain, a collagen-binding domain, and/or a hyaluronic acid-binding domain as disclosed herein can be fused to the C-terminus of the first antibody Fc domain polypeptide and/or to the C-terminus of the second antibody Fc domain polypeptide. In certain embodiments, where the IL-12 subunits are positioned C-terminal to the antibody Fc domain polypeptides, a proteoglycan-binding domain, a collagen-binding domain, and/or a hyaluronic acid-binding domain as disclosed herein can be fused to the N-terminus of the first antibody Fe domain polypeptide and/or to the N-terminus of the second antibody Fe domain polypeptide.

[0307] A proteoglycan-binding domain, collagen-binding domain, and/or hyaluronic acid-binding domain, if present, can be fused to the rest of the heterodimeric Fc-fused protein through a linker. In certain embodiments, the proteoglycan-binding domain is fused to the rest of the heterodimeric Fc-fused protein through a peptide linker. In certain embodiments, the peptide linker includes a spacer peptide disclosed herein.

### Exemplary Heterodimeric Fc-Fused Proteins

[0308] In certain embodiments, a heterodimeric Fc-fused protein of the present invention comprises a first polypeptide comprising the amino acid sequence of SEQ ID NO:290 and a second polypeptide comprising the amino acid sequence of SEQ ID NO:291. In certain embodiments, the heterodimeric Fc-fused protein of the present invention comprising SEQ ID NO:290 and SEQ ID NO:291 comprises a Y349C mutation in the CH3 domain of the first antibody Fc domain polypeptide and a S354C mutation in the CH3 domain of the second antibody Fc domain polypeptide. In certain embodiments, the heterodimeric Fc-fused protein of the present invention comprising SEQ ID NO:290 and SEQ ID NO:291 comprise different mutations in the respective Fc domain polypeptide sequences for promoting heterodimerization between the Fc domains.

[0309] In certain embodiments, the first polypeptide sequence comprises a first antibody Fc domain polypeptide (human IgG1) sequence comprising K360E and K409W substitutions. In certain embodiments, the second polypeptide sequence comprises a second antibody Fc domain polypeptide (human IgG1) sequence comprising Q347R, D399V, and F405T substitutions. In certain embodiments, the first polypeptide and second polypeptide amino acid sequences comprise one or more mutations for reducing effector functions. In certain embodiments, the heterodimeric Fc-fused protein of the present invention comprises L234A, L235A, and P329A mutations.

[0310] In certain embodiments, in the first polypeptide of the heterodimeric Fc-fused protein of the present invention (SEQ ID NO:290), the p40 subunit of human IL-12 is fused to the first antibody Fc domain polypeptide by a first linker comprising a first amino acid sequence, and in the second polypeptide of the heterodimeric Fc-fused protein of the present invention (SEQ ID NO:291), the p35 subunit of human IL-12 is fused to the second antibody Fc domain polypeptide by a second linker comprising a second amino acid sequence.

[0311] SEQ ID NO:290 is a sequence of p40 subunit of human IL-12 (underlined amino acids) fused to human IgG1 Fc domain polypeptide. Mutations are shown in bold.

(SEQ ID NO: 290)
IWELKKDVYVVELDWYPDAPGEMVVLTCDTPEEDGITWTLDQSSEVLGSG
KTLTIQVKEFGDAGQYTCHKGGEVLSHSLLLLHKKEDGIWSTDILKDQKE
PKNKTFLRCEAKNYSGRFTCWWLTTISTDLTFSVKSSRGSSDPQGVTCGA
ATLSAERVRGDNKEYEYSVECQEDSACPAAEESLPIEVMVDAVHKLKYEN
YTSSFFIRDIIKPDPPKNLQLKPLKNSRQVEVSWEYPDTWSTPHSYFSLT
FCVQVQGKSKREKKDRVFTDKTSATVICRKNASISVRAQDRYYSSSWSEW
ASVPCSPKSSDKTHTCPPCPAPEAAGGPSVFLFPPKPKDTLMISRTPEVT
CVVVDVSHEDPEVKFNWYVDGVEVHNAKTKPREEQYNSTYRVVSVLTVLH
QDWLNGKEYKCKVSNKALAAPIEKTISKAKGQPREPQVCTLPPSRDELTE
NQVSLTCLVKGFYPSDIAVEWESNGQPENNYKTTPPVLDSDGSFFLYSWL
TVDKSRWQQGNVFSCSVMHEALHNHYTQKSLSLSPG

[0312] SEQ ID NO:291 is a sequence of p35 subunit of human IL-12 (underlined amino acids) fused to human IgG1 Fc domain polypeptide. Mutations are shown in bold.

(SEQ ID NO: 291)
RNLPVATPDPGMFPCLHHSQNLLRAVSNMLQKARQTLEFYPCTSEEIDHE
DITKDKTSTVEACLPLELTKNESCLNSRETSFITNGSCLASRKTSFMMAL
CLSSIYEDLKMYQVEFKTMNAKLLMDPKRQIFLDQNMLAVIDELMQALNF
NSETVPQKSSLEEPDFYKTKIKLCILLHAFRIRAVTIDRVMSYLNASGGG
GSGGGGSGGGGSEPKSSDKTHTCPPCPAPEAAGGPSVFLFPPKPKDTLMI
SRTPEVTCVVVDVSHEDPEVKFNWYVDGVEVHNAKTKPREEQYNSTYRVV
SVLTVLHQDWLNGKEYKCKVSNKALAAPIEKTISKAKGQPREPRVYTLPP
CRDELTKNQVSLTCLVKGFYPSDIAVEWESNGQPENNYKTTPPVLVSDGS
FTLYSKLTVDKSRWQQGNVFSCSVMHEALHNHYTQKSLSLSPG

[0313] The first and second polypeptides represented by amino acid sequences SEQ ID NO:290 and SEQ ID NO:291, respectively, form a disulfide bond due to a Y349C mutation in the CH3 domain of the first antibody Fc domain polypeptide sequence (human IgG1) in SEQ ID NO:290 (bolded and underlined) and a S354C mutation in the CH3 domain of the second antibody Fc domain polypeptide sequence (human IgG1) in SEQ ID NO:291 (bolded and underlined), which imparts stability to the heterodimeric Fc-fused protein (Fc numbering according to the EU system).

[0314] For promoting heterodimerization between the two Fc domain polypeptides of the heterodimeric Fc-fused protein, the first antibody Fc domain polypeptide sequence (human IgG1) in SEQ ID NO:290 includes K360E and K409W substitutions in the CH3 domain, and the second, different Fc domain polypeptide sequence (human IgG1) in SEQ ID NO:291 includes Q347R, D399V, and F405T substitutions in the CH3 domain (Fc numbering according to the EU system).

[0315] The first antibody Fc domain polypeptide sequence and the second, different Fc domain polypeptide sequence (human IgG1) in SEQ ID NO:290 and SEQ ID NO:291 also include L234A, L235A, and P329A (LALAPA) mutations for reducing effector functions.

[0316] This heterodimeric Fc-fused protein is herein referred to as DF-hIL-12-Fc si.
[0317] (j) Methods of Preparation and Production

[0318] The proteins of the present invention can be made using recombinant DNA technology well known to a skilled person in the art. For example, a first nucleic acid sequence encoding a first polypeptide comprising a first subunit of a multisubunit protein sequence fused to a first antibody Fe domain polypeptide can be cloned into a first expression vector; a second nucleic acid sequence encoding a second polypeptide comprising a second, different subunit of a multisubunit protein sequence fused to a second antibody Fc domain polypeptide can be cloned into a second expression vector; and the first and the second expression vectors can be stably transfected together into host cells to produce the multimeric proteins.

[0319] To achieve the highest yield of the protein, different ratios of the first and second expression vectors can be explored to determine the optimal ratio for transfection into the host cells. After transfection, single clones can be isolated for cell bank generation using methods known in the art, such as limited dilution, ELISA, FACS, microscopy, or Clonepix.

[0320] Clones can be cultured under conditions suitable for bio-reactor scale-up and maintained expression of the proteins of the present invention. The proteins can be isolated and purified using methods known in the art including centrifugation, depth filtration, cell lysis, homogenization, freeze-thawing, affinity purification, gel filtration, ion exchange chromatography, hydrophobic interaction exchange chromatography, and mixed-mode chromatography.
[0321] (i) Drug Substance Preparation

[0322] In some embodiments, a heterodimeric Fc-fused protein of the present disclosure, e.g. DF hIL12-Fc si, is produced in a eukaryotic cell, e.g., a Chinese Hamster Ovary (CHO) cell. In certain embodiments, a heterodimeric Fc-fused protein of the present disclosure, e.g. DF hIL12-Fc si, is produced in a CHO cell in suspension culture (e.g., in a shake flask). In certain embodiments, a vial of CHO cells is thawed and passaged more than one time before the protein is produced (e.g., twice, thrice, four times, five times, 6 times). In certain embodiments, a vial of CHO cells is thawed and passaged four times before the protein is produced. In certain embodiments, CHO cells from the fourth passage are used to inoculate a culture in a first bioreactor. In certain embodiments, the first bioreactor has a volume of about 40 L, about 45 L, about 50 L, about 55 L, or about 60 L. In certain embodiments, the first bioreactor has a volume of about 50 L. In certain embodiments, the CHO cells from the culture of the first bioreactor are used to inoculate a culture in a production bioreactor. In certain embodiments, the production bioreactor has a volume of about 180 L, about 185 L, about 190 L, about 195 L, about 200 L, about 205 L, about 210 L, about 215 L, or about 220 L. In certain embodiments, the final culture volume in the production bioreactor is about 180 L. In certain embodiments, the CHO cells are grown in growth media supplemented with L-glutamine (e.g., 6 mM L-glutamine). In certain embodiments, the CHO cells are grown at a temperature of about 37° C. In certain embodiments, culture conditions are monitored daily (e.g., for glucose, for lactate, for pH).

[0323] In some embodiments, the production bioreactor regulates dissolved oxygen in the culture with air and oxygen supplementation. In some embodiments, the production bioreactor regulates pH with addition of carbon dioxide gas and/or sodium carbonate base. In some embodiments, the production bioreactor is sampled daily for cell density and viability until a target cell viability is met. In certain embodiments, the target cell viability is about 10×10⁶ viable cells/mL, about 11×10⁶ viable cells/mL, about 12×10⁶ viable cells/mL, about 13×10⁶ viable cells/mL, about 14×10⁶ viable cells/mL, about 15×10⁶ viable cells/mL, about 16×10⁶ viable cells/mL, about 17×10⁶ viable cells/mL, about 18×10⁶ viable cells/mL, about 19×10⁶ viable cells/mL, or about 20×10⁶ viable cells/mL. In certain embodiments, the target cell viability is greater than about 14×10⁶ viable cells/mL. In certain embodiments, after target cell viability is met, the temperature is shifted from about 37° C. to about 33° C. for culture harvest. In certain embodiments, the culture is harvested when the viability is higher than about 80%, about 81%, about 82%, about 83%, about 84%, about 85%, about 86%, about 87%, about 88%, about 89%, about 90%. In certain embodiments, the culture is harvested when the viability is higher than about 85%. In certain embodiments, culture conditions are monitored daily during the culture period (e.g., for glucose, for lactate, for pH). In certain embodiments, titer of DF hIL12-Fc si is monitored in the culture, starting at about Day 8 (e.g., Day 6, Day 7, Day 8, Day 9, or Day 10). In certain embodiments, the culture is supplemented with concentrated nutrient feeds, concentrated glucose solution, and/or antifoam. In some embodiments, the cells are cultured for about 7-about 21 days, about 8-about 20 days, about 9-about 19 days, about 10-about 18 days, about 11-about 17 days, about 12-about 16 days, or about 11-about 15 days. In certain embodiments, the cells are cultured for about 14 days.

[0324] In some embodiments, the production bioreactor is clarified by depth filtration prior to purification of a protein of the present disclosure, e.g., DF hIL12-Fc si. In certain embodiments, a two-stage single-use depth filtration system consisting of DOHC and XOHC filters is used for the clarification. In certain embodiments, before filtration, the production bioreactor temperature is adjusted to about 18° C. and the dissolved oxygen setpoint is increased to about 70% of saturation. In certain embodiments, the harvest filters are rinsed with water for injection (WFI) and then equilibrated with buffer. In some embodiments, the cell suspension is passed through the harvest filters using a peristaltic pump and the filters are flushed to collect the product. In certain embodiments, pressure is monitored and maintained at about less than 25 psig (e.g., about less than 25 psig, about less than 20 psig, or about less than 15 psig). The filtrate is then filtered through a 0.45/0.2 μm membrane into storage, e.g., in a sterile bag.

[0325] In some embodiments, purification of a heterodimeric Fc-fused protein of the present disclosure, e.g. DF hIL12-Fc si, comprises or consists of three chromatography steps and two virus clearance steps. In certain embodiments, the three chromatography steps comprise or consist of Protein A Capture Chromatography, Mixed Mode Chromatography, and Cation Exchange Chromatography. In certain embodiments, clarified harvest comprising the heterodimeric Fc-fused protein of the present disclosure, e.g. DF hIL12-Fc si, is captured by Protein A capture chromatography (e.g., using a Protein A resin column). In certain embodiments, the Protein A capture chromatography removes process-related impurities (e.g., DNA, host cell proteins), media additives, and allows for volume reduction. In certain embodiments, the Protein A resin column is first equilibrated with a buffer comprising 20 mM Tris, 150 mM NaCl, at a pH of about 7.5. In certain embodiments, after loading, the column is washed with equilibration buffer to remove unbound or loosely bound impurities, In certain embodiments, after the first wash, the column is washed a second time with a buffer comprising 50 mM acetate at a pH of about 5.4. In certain embodiments, the second wash lowers the pH and prepares the column for elution. In certain embodiments, DF hIL12-Fc si is eluted with a buffer comprising 50 mM acetate, 100 mM arginine at a pH of about 3.7. In certain embodiments, DF hIL12-Fc si is collected by 280 nm UV wavelength starting at 1.25 AU/cm ascending and then ending at 1.25 AU/cm descending. In certain embodiments, the eluate is collected in one pool, and each column cycle is individually processed by low pH virus inactivation.

[0326] In certain embodiments, the virus clearance steps comprise low pH inactivation and nanofiltration. In certain embodiments, the protein A eluate is incubated at low pH to inactive potentially present viruses. In certain embodiments, pH of the eluate is adjusted with acetic acid, e.g., 0.5 M acetic acid, and incubated for at least 30 minutes, at least 35 minutes, at least 40 minutes, at least 45 minutes, at least 50 minutes, at least 55 minutes, at least 60 minutes, at least 65 minutes, at least 70 minutes, at least 75 minutes, at least 80 minutes, at least 85 minutes, or at least 90 minutes. In certain embodiments, pH of the eluate is adjusted with acetic acid, e.g., 0.5 M acetic acid, and incubated for at least 60 minutes. In certain embodiments, the acetic acid adjusts the pH to about 3.55 to 3.75, e.g., about 3.60 to 3.70, or about 3.65. In certain embodiments, the acetic acid adjusts the pH to about 3.65. In certain embodiments, after low pH incubation, pH is raised, e.g., with Tris base, e.g., with 2 M Tris base. In certain embodiments, pH is raised to a neutralization pH of about 5.1, about 5.2, or about 5.3. In certain embodiments, the protein A eluate is filtered through a 0.2 μm filtration assembly. In certain embodiments, the low pH inactivation precedes the nanofiltration. In certain embodiments, the nanofiltration precedes the low pH inactivation.

[0327] In some embodiments, after the virus clearance steps, the pool is filtered through an intermediate depth filter, e.g., X0SP intermediate depth filter. In certain embodiments, DF hIL12-Fc si is loaded at a range of about 500-about 1000 g/m² (e.g., about 400-about 1100 g/m², about 450-about 1050 g/m², about 500-about 1000 g/m²). In certain embodiments, the X0SP pool conductivity is adjusted to less than 6.0 mS/cm with acetate, e.g. 50 mM acetate pH of about 5.2, prior to Mixed Mode Chromatography.

[0328] In some embodiments, Mixed Mode Chromatography is performed to remove high molecular weight (HMW) species. In certain embodiments, the column is equilibrated, e.g., with a buffer comprising 50 mM Acetate at pH of about 5.2, and loaded. In certain embodiments, after loading, the column is washed, e.g., with a buffer comprising 50 mM Acetate and 250 mM NaCl at pH of about 5.2. In certain embodiments, collection is initiated by 280 nm UV detection at 0.625 AU/cm ascending and ended at 1.50 AU/cm descending. In certain embodiments, after collection, each cycle is passed through a filter train containing a terminal 0.2 μm filter.

[0329] In some embodiments, Cation Exchange Chromatography is performed to remove product-related impurities (e.g., HMW species, low molecular weight (LMW) species) and process-related impurities. In some embodiments, multiples cycles of Cation Exchange Chromatography are performed (e.g., 1, 2, 3, 4, 5, 6, 7, 8, 9, or 10 or more cycles) for each product lot. In certain embodiments, the cycles are pooled and diluted, e.g., with a buffer comprising 50 mM Tris at pH 7.4. In certain embodiments, the pooled samples are adjusted to pH of about 7.3, about 7.4, about 7.5, about 7.6, or about 7.7 with a base solution, e.g., Tris, e.g., 2 M Tris base. In certain embodiments, the pooled samples are adjusted to pH of about 7.5. In certain embodiments, the column is equilibrated with a buffer comprising 50 mM Tris at pH 7.4. In certain embodiments, elution comprises a gradient of 50 mM Tris at pH of about 7.4 (Buffer A) and 50 mM Tris and 0.5 M NaCl at pH of about 7.4 (Buffer B). In certain embodiments, product collection is initiated by 280 nm UV detection starting at 2.5 AU/cm ascending and ending at 4.5 AU/cm descending. In certain embodiments, after collection, each cycle is passed through a filter train containing a terminal 0.2 μm filter.

[0330] In some embodiments, nanofiltration of the cycles from the Cation Exchange Chromatography removes viruses. In certain embodiments, the eluate first passes through a prefilter and a nominal filter (e.g., a nominal filter of about 20 nm). In certain embodiments, the system is equilibrated with a buffer, e.g., a buffer comprising 50 mM Tris and 265 mM NaCl at pH of about 7.4. In certain embodiments, after loading, the system is rinsed with equilibration buffer, e.g., a buffer comprising 50 mM Tris and 265 mM NaCl at of about pH 7.4. In certain embodiments, the filtrate is filtered through a membrane, e.g., a 0.2 μm membrane.

[0331] In some embodiments, the filtrate undergoes ultrafiltration and diafiltration (UF/DF). In certain embodiments, ultrafiltration and diafiltration are performed using a molecular weight cut-off membrane of about 20 kDa, about 25 kDa, about 30 kDa, about 35 kDa, or about 40 kDa. In certain embodiments, ultrafiltration and diafiltration are performed using a molecular weight cut-off membrane of about 30 kDa. In certain embodiments, the system is equilibrated with a buffer, e.g., a buffer comprising 50 mM Tris and 265 mM NaCl at pH of about 7.4. In certain embodiments, the viral filtrate pool is concentrated to a target of about 5.0 g/L. In certain embodiments, buffer exchange is performed against at least 7 diavolumes (e.g., 7, 8, or 9 diavolumes) of buffer comprising 20 mM Citrate at pH of about 6.5. In some embodiments, after diafiltration, a second concentration step is performed to target about 11.0 g/L. In certain embodiments, the product is diluted to a final target concentration of about 7.5 g/L in diafiltration buffer.

[0332] In some embodiments, a 20 mM Citrate, 18% (w/v) Sucrose, 3% (w/v) Mannitol, 0.03% (w/v) polysorbate-80, pH 6.5 stock solution is spiked into the UF/DF pool to target a final concentration of 20 mM Citrate, 6% (w/v) Sucrose, 1% (w/v) Mannitol, 0.01% (w/v) polysorbate-80 in the drug substance.

[0333] In certain embodiments, the formulated retentate is filtered, e.g., through a 0.2 μm membrane, into the final drug substance storage containers. In certain embodiments, the final fill volume is about 1.0 L. In certain embodiments, the final substance storage containers comprise 2 L polycarbonate bottles with polypropylene closures. In certain embodiments, each bottle is aseptically sampled, labeled, and frozen at less than −65° C. (e.g., −65° C., −70° C., −75° C., −80° C., or lower).
[0334] (ii) Drug Product Preparation

[0335] In some embodiments, frozen drug substance comprising a heterodimeric Fc-fused protein of the present disclosure, e.g. DF hIL12-Fc si, is thawed for more than 96 hours (e.g., 96 hours, 120 hours, 144 hours, 168 hours, or more), at about 2-8° C., in the dark. In certain embodiments, a buffer consisting of 20 mM citrate, 6% (w/v) sucrose, 1% (w/v) mannitol, 0.01% polysorbate 80 (w/v) at pH 6.0 is prepared. In certain embodiments, the buffer is prepared by adding solid sodium citrate dihydrate, citric acid monohydrate, sucrose, and mannitol to water for injection (WFI) and mixing until dissolution. In certain embodiments, citrate in the drug product comprises or consists of solid sodium citrate dihydrate and/or citric acid monohydrate. In some embodiments, a polysorbate 80 stock solution is prepared in WFI and added to the buffer. In certain embodiments, acceptance pH of the buffer is about 6.5±0.4 (e.g., pH 6.1, pH 6.2, pH 6.3, pH 6.4, pH 6.5, pH 6.6, pH 6.7, pH 6.8, or pH 6.9). In certain embodiments, the buffer is diluted with WFI and tested for acceptance pH of about 6.5±0.4 (e.g., pH 6.1, pH 6.2, pH 6.3, pH 6.4, pH 6.5, pH 6.6, pH 6.7, pH 6.8, or pH 6.9) and osmolality. In certain embodiments, the buffer is filtered through a membrane, e.g., a 0.2 μm membrane.

[0336] In some embodiments, the weight of drug substance is used to calculate a target batch volume. In certain embodiments, the drug substance is added to the buffer in a carboy (e.g., a 10 L carboy) to approximately 80% of the calculated batch volume and mixed. In certain embodiments, the 80% drug product solution is tested for acceptance pH acceptance of about 6.5±0.3 (e.g., pH 6.2, pH 6.3, pH 6.4, pH 6.5, pH 6.6, pH 6.7, or pH 6.8). In certain embodiments, the 80% drug product solution is tested for protein concentration by absorbance at 280 nm using an Extinction coefficient of 1.44 L/(g*cm).

[0337] In some embodiments, the buffer components are designed to yield a pH of about 6.5. In certain embodiments, at the buffer steps, a titration with 1N sodium hydroxide or 1N hydrochloric acid may be performed to bring the pH within the acceptance pH of about 6.5±0.4 (e.g., pH 6.1, pH 6.2, pH 6.3, pH 6.4, pH 6.5, pH 6.6, pH 6.7, pH 6.8, or pH 6.9). In certain embodiments, at the 80% bulk drug product steps, a titration with 1N sodium hydroxide or 1N hydrochloric acid may be performed to bring the pH within the acceptance pH of about 6.5±0.3 (e.g., pH 6.2, pH 6.3, pH 6.4, pH 6.5, pH 6.6, pH 6.7, or pH 6.8).

[0338] In some embodiments, the target concentration of a heterodimeric Fc-fused protein of the present disclosure, e.g. DF hIL12-Fc si, is about 1 mg/mL. In some embodiments, the protein concentration is verified by absorbance at 280 nm with acceptance criteria 1.0±0.2 mg/mL (e.g., 0.8 mg/mL, 0.9 mg/mL, 1.0 mg/mL, 1.1 mg/mL, 1.2 mg/mL). In some embodiments, samples are taken to confirm the acceptance pH of about 6.5±0.3 (e.g., pH 6.2, pH 6.3, pH 6.4, pH 6.5, pH 6.6, pH 6.7, or pH 6.8) and osmolality.

[0339] In some embodiments, the compounded bulk drug product solution is passed through a filter, e.g., a sterile 0.2 μm filter, into a carboy, e.g., a 10 L carboy, for bioburden reduction, and held until sterile filtration and filling.

[0340] In some embodiments, the bulk drug product is filtered through two filter capsules in series, each filter capsule consisting of a 0.45 μm polyethersulfone (PES) pre-filter membrane and a 0.2 μm PES sterilizing membrane. In certain embodiments, the drug product is filtered into a sterile, disposable fill bag inside a controlled Grade B area of the filling suite. In certain embodiments, both sterilizing filter capsules are tested for integrity by bubble point after filtration, with acceptance criteria greater than 3200 mbar, using WFI.

[0341] In some embodiments, the bulk drug product solution is filled from the disposable bag residing immediately outside of the restricted access barrier system (RABS). In certain embodiments, the product is filled into vials, e.g., ready-to-use 2R borosilicate type I vials.

[0342] In certain embodiments, the vials are stoppered, e.g., with sterilized, 13 mm serum stoppers and capped with 13 mm aluminum overseals. In certain embodiments, the fill volume of the vial is 1.3 mL±5% (i.e., from 1.235 mL to 1.365 mL). In certain embodiments, vials are moved to 2-8° C. storage. In certain embodiments, vials are stored at 2° C., 3° C., 4° C., 5° C., 6° C., 7° C., or 8° C.
[0343] (k) Pharmaceutical Formulation

[0344] The present disclosure also features pharmaceutical compositions that contain an effective amount of a protein described herein. The composition can be formulated for use in a variety of drug delivery systems. One or more physiologically acceptable excipient(s) or carrier(s) can also be included in the composition for proper formulation. The term “excipient,” as used herein, means any non-therapeutic agent added to the formulation to provide a desired physical or chemical property, for example, pH, osmolarity, viscosity, clarity, color, isotonicity, odor, sterility, stability, rate of dissolution or release, adsorption, or penetration.
[0345] (i) Excipients and pH

[0346] The one or more excipients in the pharmaceutical formulation of the present invention comprises a buffering agent. The term “buffering agent,” as used herein, refers to one or more components that when added to an aqueous solution is able to protect the solution against variations in pH when adding acid or alkali, or upon dilution with a solvent. In addition to phosphate buffers, glycinate, carbonate, citrate, histidine buffers and the like can be used, in which case, sodium, potassium or ammonium ions can serve as counterion.

[0347] In certain embodiments, the buffer or buffer system comprises at least one buffer that has a buffering range that overlaps fully or in part with the range of pH 5.5-7.4. In certain embodiments, the buffer has a pKa of about 6.5±0.5. In certain embodiments, the buffer comprises a citrate buffer. In specific embodiments, the citrate buffer comprises sodium citrate dihydrate and citric acid monohydrate. In certain embodiments, the citrate is present at a concentration of about 5 to about 100 mM, about 10 to about 100 mM, about 15 to about 100 mM, about 20 to about 100 mM, about 5 to about 50 mM, about 10 to about 50 mM, about 15 to about 100 mM, about 20 to about 100 mM, about 5 to about 25 mM, about 10 to about 25 mM, about 15 to about 25 mM, about 20 to about 25 mM, about 5 to about 20 mM, about 10 to about 20 mM, or about 15 to about 20 mM. In certain embodiments, the citrate is present at a concentration of about 5 mM, about 10 mM, about 15 mM, about 20 mM, about 25 mM, or about 50 mM. In certain embodiments, the citrate is present at a concentration of 20 mM.

[0348] The pharmaceutical formulation of the present invention may have a pH of 6.0 to 7.0. For example, in certain embodiments, the pharmaceutical formulation has a pH of 6.0 to 7.0 (i.e., 6.5±0.5), 6.1 to 6.9 (i.e., 6.5±0.4), 6.2 to 6.8 (i.e., 6.5±0.3), 6.3 to 6.7 (i.e., 6.5±0.2), 6.4 to 6.6 (i.e., 6.5±0.1), or 6.45 to 6.65 (i.e., 6.5±0.05). In certain embodiments, the pharmaceutical formulation has a pH of about 6.0, about 6.1, about 6.2, about 6.3, about 6.4, about 6.5, about 6.6, about 6.7, about 6.8, about 6.9, or about 7.0. In certain embodiments, the pharmaceutical formulation has a pH of 6.5. Under the rules of scientific rounding, a pH greater than or equal to 6.45 and smaller than or equal to 6.55 is rounded as 6.0.

[0349] In certain embodiments, the buffer system of the pharmaceutical formulation comprises citrate at 10 to 25 mM, at a pH of 6.5±0.2. In certain embodiments, the buffer system of the pharmaceutical formulation comprises citrate at 20 mM, at a pH of 6.5±0.2. In certain embodiments, the buffer system of the pharmaceutical formulation comprises citrate at 10 to 25 mM, at a pH of 6.5±0.05. In certain embodiments, the buffer system of the pharmaceutical formulation comprises citrate at 20 mM, at a pH of 6.5±0.05.

[0350] The one or more excipients in the pharmaceutical formulation of the present invention further comprises a sugar or sugar alcohol. Sugars and sugar alcohols are useful in pharmaceutical formulations as a thermal stabilizer. In certain embodiments, the pharmaceutical formulation comprises a sugar, for example, a monosaccharide (e.g., glucose, xylose, or erythritol), a disaccharide (e.g., sucrose, trehalose, maltose, or galactose), or an oligosaccharide (e.g., stachyose). In specific embodiments, the pharmaceutical formulation comprises sucrose. In certain embodiments, the pharmaceutical formulation comprises a sugar alcohol, for example, a sugar alcohol derived from a monosaccharide (e.g., mannitol, sorbitol, or xylitol), a sugar alcohol derived from a disaccharide (e.g., lactitol or maltitol), or a sugar alcohol derived from an oligosaccharide. In specific embodiments, the pharmaceutical formulation comprises mannitol.

[0351] The amount of the sugar or sugar alcohol contained within the formulation can vary depending on the specific circumstances and intended purposes for which the formulation is used. In certain embodiments, the pharmaceutical formulation comprises 0% w/v-about 12% w/v, about 1% w/v-about 11% w/v, about 2% w/v-about 10% w/v, about 30% w/v-about 9% w/v, about 3% w/v-about 12% w/v, about 4% w/v-about 8% w/v, or about 5% w/v-about 7% w/v of the sugar or sugar alcohol. In certain embodiments, the pharmaceutical formulation comprises 0% w/v-about 2% w/v, about 0.5% w/v-about 1.5% w/v, about 0.6% w/v-about 1.4% w/v, about 0.7% w/v-about 1.3% w/v, about 0.8% w/v-about 1.2% w/v, or about 0.9% w/v-about 1.1% w/v of the sugar or sugar alcohol. In certain embodiments, the pharmaceutical formulation comprises about 0% w/v, about 0.5% w/v, about 1% w/v, about 2% w/v, about 3% w/v, about 4% w/v, about 5% w/v, about 6% w/v, about 7% w/v, about 8% w/v, about 9% w/v, or about 10% w/v of the sugar or sugar alcohol. In specific embodiments, the pharmaceutical formulation comprises about 6% w/v of the sugar or sugar alcohol (e.g., sucrose). In specific embodiments, the pharmaceutical formulation comprises about 1% w/v of the sugar or sugar alcohol (e.g., mannitol). In specific embodiments, the pharmaceutical formulation comprises about 6% w/v of the sugar or sugar alcohol (e.g., sucrose) and about 1% w/v of a second sugar or sugar alcohol (e.g., mannitol).

[0352] The one or more excipients in the pharmaceutical formulation disclosed herein further comprises a surfactant. The term “surfactant,” as used herein, refers to a surface active molecule containing both a hydrophobic portion (e.g., alkyl chain) and a hydrophilic portion (e.g., carboxyl and carboxylate groups). Surfactants are useful in pharmaceutical formulations for reducing aggregation of a therapeutic protein. Surfactants suitable for use in the pharmaceutical formulations are generally non-ionic surfactants and include, but are not limited to, polysorbates (e.g., polysorbates 20 or 80); poloxamers (e.g., poloxamer 188); sorbitan esters and derivatives; Triton; sodium laurel sulfate; sodium octyl glycoside; lauryl-, myristyl-, linoleyl-, or stearyl-sulfobetadine; lauryl-, myristyl-, linoleyl- or stearyl-sarcosine; linoleyl-, myristyl-, or cetyl-betaine; lauramidopropyl-cocamidopropyl-, linoleamidopropyl-, myristamidopropyl-, palmidopropyl-, or isostearamidopropylbetaine (e.g., lauroamidopropyl); myristamidopropyl-, palmidopropyl-, or isostearamidopropyl-dimethylamine; sodium methyl cocoyl-, or disodium methyl oleyl-taurate; and the MONAQUAT™ series (Mona Industries, Inc., Paterson, N.J.), polyethylene glycol, polypropyl glycol, and copolymers of ethylene and propylene glycol (e.g., Pluronics, PF68 etc.). In certain embodiments, the surfactant is a polysorbate. In certain embodiments, the surfactant is polysorbate 80.

[0353] The amount of a non-ionic surfactant contained within the pharmaceutical formulation of the present invention may vary depending on the specific properties desired of the formulation, as well as the particular circumstances and purposes for which the formulations are intended to be used. In certain embodiments, the pharmaceutical formulation comprises 0.005% to about 0.5%, about 0.005% to about 0.2%, about 0.005% to about 0.1%, about 0.005% to about 0.05%, about 0.005% to about 0.02%, about 0.005% to about 0.01%, about 0.01% to about 0.5%, about 0.01% to about 0.2%, about 0.01% to about 0.1%, about 0.01% to about 0.05%, or about 0.01% to about 0.02% of the non-ionic surfactant (e.g., polysorbate 80). In certain embodiments, the pharmaceutical formulation comprises about 0.005%, about 0.01%, about 0.02%, about 0.03%, about 0.04%, about 0.05%, about 0.06%, about 0.07%, about 0.08%, about 0.09%, about 0.1%, about 0.15%, about 0.2%, about 0.25%, about 0.3%, about 0.35%, about 0.4%, about 0.45%, or about 0.5% of the non-ionic surfactant (e.g., polysorbate 80).

[0354] The pharmaceutical formulation of the present invention may further comprise one or more other substances, such as a bulking agent or a preservative. A “bulking agent” is a compound which adds mass to a lyophilized mixture and contributes to the physical structure of the lyophilized cake (e.g., facilitates the production of an essentially uniform lyophilized cake which maintains an open pore structure). Illustrative bulking agents include mannitol, glycine, polyethylene glycol and sorbitol. The lyophilized formulations of the present invention may contain such bulking agents. A preservative reduces bacterial action and may, for example, facilitate the production of a multi-use (multiple-dose) formulation.
[0355] (ii) Exemplary Formulations

[0356] In certain embodiments, the pharmaceutical formulation of the present invention comprises the heterodimeric Fc-fused protein, citrate, a sugar (e.g., sucrose), a sugar alcohol (e.g., mannitol), and a polysorbate (e.g., polysorbate 80), at pH 6.0 to 7.0.

[0357] In certain embodiments, the pharmaceutical formulation comprises 0.5 to 1.5 mg/mL of the heterodimeric Fc-fused protein, 10 to 30 mM of citrate, 4% w/v to 8% w/v of a sugar (e.g., sucrose), 0.5% w/v to 1.5% w/v of a sugar alcohol (e.g., mannitol), and 0.005% to 0.05% of a polysorbate (e.g., polysorbate 80), at pH 6.5 to 7.5. In certain embodiments, the pharmaceutical formulation comprises 0.5 to 1.5 mg/mL of the heterodimeric Fc-fused protein, 20 mM of citrate, 6% w/v of a sugar (e.g., sucrose), 0.5% w/v to 1.5% w/v of a sugar alcohol (e.g., mannitol), and 0.01% of a polysorbate (e.g., polysorbate 80), at pH 6.0 to 7.0. In certain embodiments, the pharmaceutical formulation comprises 0.5 to 1.5 mg/mL of the heterodimeric Fc-fused protein, 20 mM of citrate, 6% w/v of a sugar (e.g., sucrose), 1% w/v of a sugar alcohol (e.g., mannitol), and 0.01% of a polysorbate (e.g., polysorbate 80), at pH 6.3 to 6.7. In certain embodiments, the pharmaceutical formulation comprises 0.5 to 1.5 mg/mL of the heterodimeric Fc-fused protein, 20 mM of citrate, 6% w/v of a sugar (e.g., sucrose), 1% w/v of a sugar alcohol (e.g., mannitol), and 0.01% of a polysorbate (e.g., polysorbate 80), at pH 6.45 to 6.55.
[0358] (iii) Stability of the Heterodimeric Fc-fused Protein and Formulation

[0359] The pharmaceutical formulations of the present invention exhibit high levels of stability. A pharmaceutical formulation is stable when the heterodimeric Fc-fused protein within the formulation retains an acceptable degree of physical property, chemical structure, and/or biological function after storage under defined conditions. In certain embodiments, the pharmaceutical formulation is a clear liquid, free of visible particulates. In certain embodiments, the thermal stability is tested at 5° C., 50° C., and following freeze-thaw cycles (e.g., 5 freeze-thaw cycles).

[0360] Stability can be measured by determining the percentage of the heterodimeric Fc-fused protein in the formulation that remains in a native conformation after storage for a defined amount of time at a defined temperature. The percentage of a protein in a native conformation can be determined by, for example, size exclusion chromatography (e.g., size exclusion high performance liquid chromatography, SEC-HPLC), where a protein in the native conformation is not aggregated (eluted in a high molecular weight fraction) or degraded (eluted in a low molecular weight fraction). In certain embodiments, more than about 95%, more than about 96%, more than about 97%, more than about 98%, or more than about 99% of the heterodimeric Fc-fused protein has native conformation, as determined by size-exclusion chromatography, after incubation at 2-8° C. for 2 weeks. In certain embodiments, more than about 95%, more than about 96%, more than about 97%, more than about 98%, or more than about 99% of the heterodimeric Fc-fused protein has native conformation, as determined by size-exclusion chromatography, after freeze-thaw. In certain embodiments, more than about 75%, more than about 76%, more than about 77%, more than about 78%, more than about 79%, more than about 80%, more than about 81%, more than about 82%, more than about 83%, more than about 84%, or more than about 85% of the heterodimeric Fc-fused protein has native conformation, as determined by size-exclusion chromatography, after incubation at 50° C. for 2 weeks. In certain embodiments, less than about 0.5%, less than about 0.6%, less than about 0.7%, less than about 0.8%, less than about 0.9%, or less than about 1% of the heterodimeric Fc-fused protein forms a high molecular weight complex (i.e., having a higher molecular weight than the native protein), as determined by size-exclusion chromatography, after incubation at 2-8° C. for 2 weeks. In certain embodiments, less than about 40%, less than about 30%, less than about 20%, less than about 10%, less than about 5%, less than about 4%, less than about 3%, less than about 2%, or less than about 1% of the heterodimeric Fc-fused protein form a high molecular weight complex (i.e., having a higher molecular weight than the native protein), as determined by size-exclusion chromatography, after incubation at 50° C. for 2 weeks. In certain embodiments, less than about 0.5%, less than about 0.6%, less than about 0.7%, less than about 0.8%, less than about 0.9%, or less than about 1% of the heterodimeric Fc-fused protein forms a high molecular weight complex (i.e., having a higher molecular weight than the native protein), as determined by size-exclusion chromatography, after freeze-thaw. In certain embodiments, less than about 0.1%, less than about 0.2%, less than about 0.3%, less than about 0.4%, less than about 0.5%, less than about 0.6%, less than about 0.7%, less than about 0.8%, less than about 0.9%, or less than about 1% of the heterodimeric Fc-fused protein is degraded (i.e., having a lower molecular weight than the native protein), as determined by size-exclusion chromatography, after incubation at 2-8° C. for 2 weeks. In certain embodiments, less than about 1%, less than about 1.5%, less than about 2%, less than about 2.5%, or less than about 3% of the heterodimeric Fc-fused protein is degraded (i.e., having a lower molecular weight than the native protein), as determined by size-exclusion chromatography, after incubation at 50° C. for 2 weeks. In certain embodiments, less than about 0.1%, less than about 0.2%, less than about 0.3%, less than about 0.4%, less than about 0.5%, less than about 0.6%, less than about 0.7%, less than about 0.8%, less than about 0.9%, or less than about 1% of the heterodimeric Fc-fused protein is degraded (i.e., having a lower molecular weight than the native protein), as determined by size-exclusion chromatography, after freeze-thaw.

[0361] SEC-HPLC can provide a measure of the purity of a pharmaceutical formulation by the percentage of protein, e.g., the heterodimeric Fc-fused protein, in the main peak. A purity profile is determined by the area of the main peak as a percentage of total detected area in a SEC-HPLC analysis. In some embodiments, the purity profile of the pharmaceutical formulation, is greater than about 90%, greater than about 91%, greater than about 92%, greater than about 93%, greater than about 94%, greater than about 95%, greater than about 96%, greater than about 97%, greater than about 98%, or greater than about 99%. In certain embodiments, the purity profile of the pharmaceutical formulation, is about 99.0%. In some embodiments, the purity profile of the pharmaceutical formulation, is greater than about 75%, greater than about 80%, greater than about 81%, greater than about 82%, greater than about 83%, greater than about 84%, or greater than about 85%, after the pharmaceutical formulation is incubated for 2 weeks at 50° C. In certain embodiments, the purity profile of the pharmaceutical formulation, is about 85.2%. In some embodiments, the purity profile of the pharmaceutical formulation, is greater than about 90%, greater than about 91%, greater than about 92%, greater than about 93%, greater than about 94%, greater than about 95%, greater than about 96%, greater than about 97%, greater than about 98%, or greater than about 98.5% after the pharmaceutical formulation is subjected to five freeze thaw cycles. In certain embodiments, the purity profile of the pharmaceutical formulation, is about 98.9%.

[0362] Stability can also be measured by determining the parameters of a protein solution by dynamic light scattering. The Z-average and polydispersity index (PDI) values indicate the average diameter of particles in a solution and these measures increase when aggregates are present in the solution. The monomer % Pd value indicates the spread of different monomers detected, where lower values indicate a monodisperse solution, which is preferred. The monomer size detected by DLS is useful in confirming that the main population is monomer and to characterize any higher order aggregates that may be present. In certain embodiments, the Z-average value of the pharmaceutical formulation does not increase by more than 5%, 10%, or 15% after incubation at 2-8° C. for 2 weeks. In certain embodiments, the Z-average value of the pharmaceutical formulation does not increase by more than 2-fold, 3-fold, 4-fold, or 5-fold after freeze-thaw. In certain embodiments, the Z-average value of the pharmaceutical formulation does not increase by more than about 10%, more than about 20%, more than about 30%, more than about 40%, more than about 50%, more than about 60%, more than about 70%, more than about 80%, more than about 90%, more than about 100%, more than about 150%, or more than about²⁰⁰% after incubation at 50° C. for 2 weeks. In some embodiments, the heterodimeric Fc-fused protein in the pharmaceutical formulation has a Z-average hydrodynamic diameter of less than about 15 nm, less than about 14 nm, less than about 13 nm, or less than about 12 nm, as measured by dynamic light scattering at 25° C. In specific embodiments, the heterodimeric Fc-fused protein in the pharmaceutical formulation has a Z-average hydrodynamic diameter of less than about 11.6 nm as measured by dynamic light scattering at 25° C. In some embodiments, the heterodimeric Fc-fused protein in the pharmaceutical formulation has a Z-average hydrodynamic diameter of less than about 20 nm, less than about 19 nm, less than about 18 nm, less than about 17 nm, less than about 16 nm, less than about 15.5, less than about 15 nm, or less than about 14.5, as measured by dynamic light scattering at 25° C., after the pharmaceutical formulation is incubated for 2 weeks at 50° C. In specific embodiments, the heterodimeric Fc-fused protein in the pharmaceutical formulation has a Z-average hydrodynamic diameter of about 14.4 nm. In some embodiments, the heterodimeric Fc-fused protein in the pharmaceutical formulation has a Z-average hydrodynamic diameter of less than about 20 nm, less than about 19 nm, less than about 18 nm, less than about 17 nm, less than about 16.5 nm, less than about 16 nm, or less than about 15.5 nm as measured by dynamic light scattering at 25° C., after the pharmaceutical formulation is subjected to five freeze thaw cycles. In certain embodiments, the heterodimeric Fc-fused protein in the pharmaceutical formulation has a Z-average hydrodynamic diameter of about 15.3 nm.

[0363] In certain embodiments, the PDI value of the pharmaceutical formulation does not increase by more than about 2-fold, about 3-fold, about 4-fold, or about 5-fold after incubation at 2-8° C. for 2 weeks. In certain embodiments, the PDI value of the pharmaceutical formulation does not increase by more than about 2-fold, about 3-fold, about 4-fold, about 5-fold, or about 6-fold after freeze-thaw. In certain embodiments, the PDI value of the pharmaceutical formulation does not increase by more than about 2-fold, about 3-fold, about 4-fold, about 5-fold, or about 6-fold after incubation at 50° C. for 2 weeks. In some embodiments, the polydispersity index of the heterodimeric Fc-fused protein in the pharmaceutical formulation is less than about 0.30, less than about 0.29, less than about 0.28, less than about 0.27, less than about 0.26, or less than about 0.25 as measured by dynamic light scattering at 25° C. In certain embodiments, the polydispersity index of the heterodimeric Fc-fused protein in the pharmaceutical formulation is about 0.26. In some embodiments, the polydispersity index of the heterodimeric Fc-fused protein in the pharmaceutical formulation is less than about 0.30, less than about 0.29, less than about 0.28, less than about 0.27, or less than about 0.26 as measured by dynamic light scattering at 25° C., after the pharmaceutical formulation is incubated for 2 weeks at 50° C. In certain embodiments, the polydispersity index of the heterodimeric Fc-fused protein in the pharmaceutical formulation is about 0.25. In some embodiments, the polydispersity index of the heterodimeric Fc-fused protein in the pharmaceutical formulation is less than about 0.40, less than about 0.35, or less than about 0.34, as measured by dynamic light scattering at 25° C., after the pharmaceutical formulation is subjected to five freeze thaw cycles. In certain embodiments, the polydispersity index of the heterodimeric Fc-fused protein in the pharmaceutical formulation is about 0.33.

[0364] Stability can also be measured by determining the thermal stability of a protein solution by differential scanning fluorimetry (DSF). DSF allows for quantification of changes in the thermal denaturation temperature and stability of a protein under varying test conditions, e.g., buffer or pH. In some embodiments, DSF provides two thermal unfolding temperatures (also known as melting temperatures), Tₘ₁ and Tₘ₂. In certain embodiments, the Tₘ₁ of the pharmaceutical formulation is greater than about 60° C., greater than about 61° C., greater than about 62° C., greater than about 63° C., greater than about 64° C., greater than about 65° C., or greater than about 66° C. In certain embodiments, the Tₘ₁ of the pharmaceutical formulation is greater than about 70° C., greater than about 71° C., greater than about 72° C., greater than about 73° C., greater than about 74° C., greater than about 75° C., greater than about 76° C., or greater than about 77° C. In specific embodiments, the pharmaceutical formulation has a thermal stability profile defined by a Tₘ₁ of about 67.0° C. and a Tₘ₂ of about 77.3° C. In certain embodiments, the Tₘ₁ and/or Tₘ₂ is changed by less than 2° C., less than 1.5° C., or less than 1° C. when the pharmaceutical formulation is incubated for 1 week at 50° C., as compared to the same pharmaceutical formulation that is incubated for 1 week at 5° C. In specific embodiments, the Tₘ₁ is changed by less than 1° C. when the pharmaceutical formulation is incubated for 1 week at 50° C., as compared to the same pharmaceutical formulation that is incubated for 1 week at 5° C. In specific embodiments, the Tₘ₂ is changed by less than 1° C. when the pharmaceutical formulation is incubated for 1 week at 50° C., as compared to the same pharmaceutical formulation that is incubated for 1 week at 5° C.

[0365] In some embodiments, DSF provides the temperature at which protein aggregation begins to occur, T_{agg}. In some embodiments, the T_{agg}. of the pharmaceutical formulation is greater than 60° C., greater than about 61° C., greater than about 62° C., greater than about 63° C., greater than about 64° C., greater than about 65° C., greater than about 66° C., or greater than about 67° C. In certain embodiments, the T_{agg} is changed by less than about 2° C., less than 1.5° C., or less than about 1° C. when the pharmaceutical formulation is incubated for 1 week at 50° C., as compared to the same pharmaceutical formulation that is incubated for 1 week at 5° C. In certain embodiments, the T_{agg} is changed by less than about 2° C., less than about 1.5° C., or less than about 1° C. when the pharmaceutical formulation is incubated for 1 week at 50° C., as compared to the same pharmaceutical formulation that is incubated for 1 week at 5° C. In certain embodiments, the T_{agg} is changed by less than about 1° C. when the pharmaceutical formulation is incubated for 1 week at 50° C., as compared to the same pharmaceutical formulation that is incubated for 1 week at 5° C.

[0366] In some embodiments, pH is used to determine stability of the pharmaceutical formulation. In some embodiments, the pH of the pharmaceutical formulation does not change by more than about 0.25, about 0.2, about 0.15, or about 0.1 in pH value after the pharmaceutical formulation is incubated for 1 week at 5° C. In certain embodiments, the pH of the pharmaceutical formulation does not change by more than about 0.2 or about 0.1 in pH value after the pharmaceutical formulation is incubated for 1 week at 5° C. In some embodiments, the pH of the pharmaceutical formulation does not change by more than about 0.25, about 0.2, about 0.15, or about 0.1 in pH value after the pharmaceutical formulation is incubated for 1 week at 50° C. In certain embodiments, the pH of the pharmaceutical formulation does not change by more than about 0.2 or about 0.1 in pH value after the pharmaceutical formulation is incubated for 1 week at 50° C.

[0367] Exemplary methods to determine stability of the heterodimeric Fc-fused protein in the pharmaceutical formulation are described in Example 24 of the present disclosure.
[0368] (iv) Dosage Forms

[0369] The pharmaceutical formulation can be prepared and stored as a liquid formulation or a lyophilized form. In certain embodiments, the pharmaceutical formulation is a clear, colorless solution, free of visible particulates. In certain embodiments, the pharmaceutical formulation is a liquid formulation for storage at 2-8° C. (e.g., 4° C.), a frozen formulation for storage at −20° C. or lower, or a frozen formulation for storage at −65° C. or lower. The sugar and/or sugar alcohol in the formulation are used as lyoprotectants.

[0370] Prior to pharmaceutical use, the pharmaceutical formulation can be diluted or reconstituted in an aqueous carrier suitable for the route of administration. Other exemplary carriers include sterile water for injection (SWFI), bacteriostatic water for injection (BWFI), a pH buffered solution (e.g., phosphate-buffered saline), sterile saline solution, Ringer's solution, or dextrose solution. For example, when the pharmaceutical formulation is prepared for administration, the pharmaceutical formulation can be diluted in a 0.9% sodium chloride (NaCl) solution. In specific embodiments, the pharmaceutical formulation the pharmaceutical formulation is diluted in a 0.9% sodium chloride (NaCl) solution comprising 0.01% polysorbate 80. In certain embodiments, the diluted pharmaceutical formulation is isotonic and suitable for administration by subcutaneous injection.

[0371] The pharmaceutical formulation comprises the heterodimeric Fc-fused protein at a concentration suitable for storage. In certain embodiments, the pharmaceutical formulation comprises the heterodimeric Fc-fused protein at a concentration of about 0.1-about 2 mg/mL, about 0.2-about 1.8 mg/mL, about 0.3-about 1.7 mg/mL, about 0.4-about 1.6 mg/mL, about 0.5-about 1.5 mg/mL, about 0.6-about 1.4 mg/mL, about 0.7-about 1.3 mg/mL, about 0.8-about 1.2 mg/mL, or about 0.9-about 1.1 mg/mL. In certain embodiments, the pharmaceutical formulation comprises the heterodimeric Fc-fused protein at a concentration of about 0.1 mg/mL, about 0.2 mg/mL, about 0.3 mg/mL, about 0.4 mg/mL, about 0.5 mg/mL, about 0.6 mg/mL, about 0.7 mg/mL, about 0.8 mg/mL, about 0.9 mg/mL, about 1 mg/mL, about 2 mg/mL, about 2.5 mg/mL, about 3 mg/mL, about 3.5 mg/mL, about 4 mg/mL, about 4.5 mg/mL, about 5 mg/mL, or about 10 mg/mL.

[0372] In certain embodiments, the pharmaceutical formulation comprises the heterodimeric Fc-fused protein at a bulk concentration of about 1 g/L to about 10 g/L, about 2 g/L to about 8 g/L, about 4 g/L to about 6 g/L, or about 5 g/L. In certain embodiments, the pharmaceutical formulation comprises the heterodimeric Fc-fused protein at a bulk concentration of about 1 g/L, about 2 g/L, about 3 g/L, about 4 g/L, about 5 g/L, about 6 g/L, about 7 g/L, about 8 g/L, about 9 g/L, or about 10 g/L. In specific embodiments, the pharmaceutical formulation comprises a bulk concentration of heterodimeric Fc-fused protein of about 5 g/L. In certain embodiments, the pharmaceutical formulation comprises a concentration for administration of heterodimeric Fc-fused protein of about 0.5 g/L-about 2 g/L, about 0.75 g/L-about 1.5 g/L, or about 0.9 g/L-about 1.1 g/L. In certain embodiments, the pharmaceutical formulation comprises a concentration for administration of heterodimeric Fc-fused protein of about 0.5 g/L, about 0.6 g/L, about 0.7 g/L, about 0.8 g/L, about 0.9 g/L, about 1 g/L, about 1.1 g/L, about 1.2 g/L, about 1.3 g/L, about 1.4 g/L, about 1.5 g/L, or about 2 g/L. In specific embodiments, the pharmaceutical formulation comprises a concentration for administration of heterodimeric Fc-fused protein of about 1 g/L.

[0373] In certain embodiments, the pharmaceutical formulation is packaged in a container (e.g., a vial, bag, pen, or syringe). In certain embodiments, the formulation may be a lyophilized formulation or a liquid formulation. In certain embodiments, the amount of heterodimeric Fc-fused protein in the container is suitable for administration as a single dose. In certain embodiments, the amount of heterodimeric Fc-fused protein in the container is suitable for administration in multiple doses. In certain embodiments, the pharmaceutical formulation comprises the heterodimeric Fc-fused protein at an amount of about 0.1 to about 10 mg. In certain embodiments, the pharmaceutical formulation comprises the heterodimeric Fc-fused protein at an amount of about 0-about 2 mg, about 0.2-about 1.8 mg, about 0.3-about 1.7 mg, about 0.4-about 1.6 mg, about 0.5-about 1.5 mg, about 0.6-about 1.4 mg, about 0.7-about 1.3 mg, about 0.8-about 1.2 mg, or about 0.9-about 1.1 mg. In certain embodiments, the pharmaceutical formulation comprises the heterodimeric Fc-fused protein at an amount of about 0.1 mg, about 0.2 mg, about 0.3 mg, about 0.4 mg, about 0.5 mg, about 1 mg, about 2 mg, about 3 mg, about 4 mg, about 5 mg, or about 10 mg. In specific embodiments, the pharmaceutical formulation comprises the heterodimeric Fc-fused protein, e.g., DF-hIL-12-Fc si, at an amount of about 1 mg.
[0374] (1) Dosage Regimens and Therapeutic Uses

[0375] In another aspect, the present disclosure provides a method for treating cancer, the method comprising administering to a subject in need thereof a heterodimeric Fc-fused protein disclosed herein (e.g., DF-hIL-12-Fc si) in an initial three-week treatment cycle on Day 1. In certain embodiments, the heterodimeric Fc-fused protein is administered to the subject only Day 1 in the initial three-week treatment cycle.

[0376] In certain embodiments, the method comprises administering to the subject in need thereof the heterodimeric Fc-fused protein in combination with an anti-PD-1 antibody, e.g., pembrolizumab, in an initial three-week treatment cycle on Day 1. In certain embodiments, the heterodimeric Fc-fused protein and anti-PD-1 antibody are administered to the subject only Day 1 in the initial three-week treatment cycle. In certain embodiments, administration of the PD-1 antibody precedes administration of the heterodimeric Fc-fused protein.

[0377] In certain embodiments, the method further comprises administering to the subject, after the initial treatment cycle, the heterodimeric Fc-fused protein in one or more subsequent three-week treatment cycles, wherein the heterodimeric Fc-fused protein is administered on Day 1 in each subsequent treatment cycle. The subsequent treatment cycles, in which the subject receives administration of the heterodimeric Fc-fused protein once every three weeks or once every four weeks, are designed to maintain a certain level of the heterodimeric Fc-fused protein in the subject. In certain embodiments, the subject receives administration of the heterodimeric Fc-fused protein once every three weeks, once every four weeks, once every five weeks, or once every six weeks. In certain embodiments, the subject receives administration of the heterodimeric Fc-fused protein once every six weeks, i.e., once every other treatment cycle. In certain embodiments, the subject receives at least 1, 2, 3, 4, 5, 6, 7, 8, 9, 10, 11, 12, 13, 14, or 15 subsequent treatment cycles. In certain embodiments, the subject receives subsequent treatment cycles until regression of the cancer (i.e., a complete response). In certain embodiments, the subject has advanced (i.e., unresectable or metastatic) melanoma. In certain embodiments, the subject has advanced (i.e., unresectable or metastatic) renal cell carcinoma.

[0378] In certain embodiments, the method further comprises administering to the subject, after the initial treatment cycle, the heterodimeric Fc-fused protein in one or more subsequent three-week treatment cycles, in combination with an anti-PD-1 antibody, e.g., pembrolizumab, wherein the heterodimeric Fc-fused protein and anti-PD-1 antibody are administered on Day 1 in each subsequent treatment cycle. The subsequent treatment cycles, in which the subject receives administration of the heterodimeric Fc-fused protein and anti-PD-1 antibody once every three weeks, are designed to maintain a certain level of the heterodimeric Fc-fused protein and anti-PD-1 antibody in the subject. In certain embodiments, the subject receives at least 1, 2, 3, 4, 5, 6, 7, 8, 9, 10, 11, 12, 13, 14, or 15 subsequent treatment cycles. In certain embodiments, administration of the anti-PD-1 antibody precedes administration of the heterodimeric Fc-fused protein. In certain embodiments, the subject receives subsequent treatment cycles until regression of the cancer (i.e., a complete response). In certain embodiments, the subject has advanced (i.e., unresectable or metastatic) urothelial carcinoma.

[0379] In certain embodiments, one or more doses in the initial and subsequent treatment cycles comprise the heterodimeric Fc-fused protein at an amount of 0.01-about 3 μg/kg, about 0.01-about 0.02 μg/kg, about 0.01-about 0.05 μg/kg, about 0.05-about 0.1 μg/kg, about 0.05-about 0.5 μg/kg, about 0.05-about 0.75 μg/kg, about 0.05-about 1 μg/kg, about 0.05-about 1.5 μg/kg, about 0.05-about 2 μg/kg, about 0.05-about 2.5 μg/kg, about 0.05-about 3 μg/kg, about 0.1-about 3 μg/kg, about 0.1-about 1 μg/kg, about 0.5-about 1 μg/kg, about 0.1-about 2 μg/kg, about 0.5-about 2 μg/kg, about 0.1-about 0.5 μg/kg, about 0.1-about 0.25 μg/kg, about 0.2-about 1 μg/kg, about 0.2-about 2 μg/kg, about 1-about 1.2 μg/kg, about 1-about 1.5 μg/kg, about 1-about 2 μg/kg, about 1-about 2.5 μg/kg, about 0.5-about 2.5 μg/kg, about 1-about 3 μg/kg, or about 0.5-about 3 μg/kg. In certain embodiments, one or more doses in the initial and subsequent treatment cycles comprise the heterodimeric Fc-fused protein at an amount selected from the group consisting of about 0.01 μg/kg, about 0.02 μg/kg, about 0.03 μg/kg, about 0.04 μg/kg, about 0.05 μg/kg, about 0.1 μg/kg, about 0.15 μg/kg, about 0.2 μg/kg, about 0.25 μg/kg, about 0.3 μg/kg, about 0.35 μg/kg, about 0.4 μg/kg, about 0.45 μg/kg, about 0.5 μg/kg, about 0.6 μg/kg, about 0.7 μg/kg, about 0.8 μg/kg, about 0.9 μg/kg, about 1 μg/kg, about 1.2 μg/kg, about 1.25 μg/kg, about 1.3 μg/kg, about 1.4 μg/kg, about 1.5 μg/kg, about 1.75 μg/kg, about 2 μg/kg, about 2.5 μg/kg, about 3 μg/kg, about 4 μg/kg, or about 5 μg/kg.

[0380] In certain embodiments, each of the doses in the initial and subsequent treatment cycles comprises the heterodimeric Fc-fused protein at an amount of 0.01-about 3 μg/kg, about 0.01-about 0.02 μg/kg, about 0.01-about 0.05 μg/kg, about 0.05-about 0.1 μg/kg, about 0.05-about 0.5 μg/kg, about 0.05-about 0.75 μg/kg, about 0.05-about 1 μg/kg, about 0.05-about 1.5 μg/kg, about 0.05-about 2 μg/kg, about 0.05-about 2.5 μg/kg, about 0.05-about 3 μg/kg, about 0.1-about 3 μg/kg, about 0.1-about 1 μg/kg, about 0.5-about 1 μg/kg, about 0.1-about 2 μg/kg, about 0.5-about 2 μg/kg, about 0.1-about 0.5 μg/kg, about 0.1-about 0.25 μg/kg, about 0.2-about 1 μg/kg, about 0.2-about 2 μg/kg, about 1-about 1.2 μg/kg, about 1-about 1.5 μg/kg, about 1-about 2 μg/kg, about 1-about 2.5 μg/kg, about 0.5-about 2.5 μg/kg, about 1-about 3 μg/kg, or about 0.5-about 3 μg/kg. In certain embodiments, each of the doses in the initial and subsequent treatment cycles comprises the heterodimeric Fc-fused protein at a same amount selected from the group consisting of about 0.01 μg/kg, about 0.02 μg/kg, about 0.03 μg/kg, about 0.04 μg/kg, about 0.05 μg/kg, about 0.1 μg/kg, about 0.15 μg/kg, about 0.2 μg/kg, about 0.25 μg/kg, about 0.3 μg/kg, about 0.35 μg/kg, about 0.4 μg/kg, about 0.45 μg/kg, about 0.5 μg/kg, about 0.6 μg/kg, about 0.7 μg/kg, about 0.8 μg/kg, about 0.9 μg/kg, about 1 μg/kg, about 1.2 μg/kg, about 1.25 μg/kg, about 1.3 μg/kg, about 1.4 μg/kg, about 1.5 μg/kg, about 1.75 μg/kg, about 2 μg/kg, about 2.5 μg/kg, about 3 μg/kg, about 4 μg/kg, or about 5 μg/kg.

[0381] In certain embodiments, each of the doses in the initial and subsequent treatment cycles comprises the heterodimeric Fc-fused protein at an amount 0.01-about 3 μg/kg, about 0.01-about 0.02 μg/kg, about 0.01-about 0.05 μg/kg, about 0.05-about 0.1 μg/kg, about 0.05-about 0.5 μg/kg, about 0.05-about 0.75 μg/kg, about 0.05-about 1 μg/kg, about 0.05-about 1.5 μg/kg, about 0.05-about 2 μg/kg, about 0.05-about 2.5 μg/kg, about 0.05-about 3 μg/kg, about 0.1-about 3 μg/kg, about 0.1-about 1 μg/kg, about 0.5-about 1 μg/kg, about 0.1-about 2 μg/kg, about 0.5-about 2 μg/kg, about 0.1-about 0.5 μg/kg, about 0.1-about 0.25 μg/kg, about 0.2-about 1 μg/kg, about 0.2-about 2 μg/kg, about 1-about 1.2 μg/kg, about 1-about 1.5 μg/kg, about 1-about 2 μg/kg, about 1-about 2.5 μg/kg, about 0.5-about 2.5 μg/kg, about 1-about 3 μg/kg, or about 0.5-about 3 μg/kg. In certain embodiments, each of the doses in the initial and subsequent treatment cycles comprises the heterodimeric Fc-fused protein at a same amount selected from the group consisting of about 0.01 μg/kg, about 0.02 μg/kg, about 0.03 μg/kg, about 0.04 μg/kg, about 0.05 μg/kg, about 0.1 μg/kg, about 0.15 μg/kg, about 0.2 μg/kg, about 0.25 μg/kg, about 0.3 μg/kg, about 0.35 μg/kg, about 0.4 μg/kg, about 0.45 μg/kg, about 0.5 μg/kg, about 0.6 μg/kg, about 0.7 μg/kg, about 0.8 μg/kg, about 0.9 μg/kg, about 1 μg/kg, about 1.2 μg/kg, about 1.25 μg/kg, about 1.3 μg/kg, about 1.4 μg/kg, about 1.5 μg/kg, about 1.75 μg/kg, about 2 μg/kg, about 2.5 μg/kg, about 3 μg/kg, about 4 μg/kg, or about 5 μg/kg.

[0382] In certain embodiments, the heterodimeric Fc-fused protein is administered subcutaneously. For example, in certain embodiments, the heterodimeric Fc-fused protein is administered by subcutaneous injection, e.g., with a prefilled pen or a prefilled syringe. In certain embodiments, the heterodimeric Fc-fused protein is administered in a volume of about 0.1 mL, about 0.2 mL, about 0.3 mL, about 0.4 mL, about 0.5 mL, about 0.6 mL, about 0.7 mL, about 0.8 mL, about 0.9 mL, about 1 mL, about 1.1 mL, or about 1.2 mL. In certain embodiments, the heterodimeric Fc-fused protein is administered in a volume of about 1 mL. In certain embodiments, the heterodimeric Fc-fused protein is administered in a maximum of 2 injection sites (e.g., 1 injection site, or 2 injection sites). In specific embodiments, the heterodimeric Fc-fused protein is administered in a single injection. In specific embodiments, the heterodimeric Fc-fused protein is administered in two injections. In specific embodiments, the heterodimeric Fc-fused protein is administered in two injections, and a second injection is completed within 10 minutes after a first injection.

[0383] In certain embodiments, the anti-PD-1 antibody, e.g., pembrolizumab, is administered intravenously. In certain embodiments, the anti-PD-1 antibody is administered intravenously preceding administration of the heterodimeric Fc-fused protein. In certain embodiments, the anti-PD-1 antibody is administered intravenously no more than 1 hour (e.g., 5 mins, 10 mins, 15 mins, 20 mins, 25 mins, 30 mins, 35 mins, 40 mins, 45 mins, 50 mins, 55 mins, 1 hour) prior to administration of the heterodimeric Fc-fused protein. In certain embodiments, the PD-1 antibody is administered intravenously concurrently with administration of the heterodimeric Fc-fused protein.

[0384] The types of cancer that can be treated with the heterodimeric Fc-fused protein or pharmaceutical formulation disclosed herein include but are not limited to melanoma, non-small cell lung cancer (NSCLC), small-cell lung cancer (SCLC), head and neck squamous cell carcinoma (HNSCC), classical Hodgkin lymphoma, primary mediastinal large B-Cell lymphoma, bladder cancer, urothelial carcinoma, micro-satellite instability high cancer, colorectal cancer, gastric cancer, oesophageal cancer, cervical cancer, hepatocellular carcinoma, Merkel cell carcinoma, renal cell carcinoma (RCC), endometrial carcinoma, cutaneous T cell lymphoma, or triple negative breast cancer. In certain embodiments, the cancer is a solid tumor. In certain embodiments, the cancer is a locally advanced or metastatic solid tumor. In certain embodiments, the cancer is melanoma. In certain embodiments, the cancer is renal cell carcinoma. In certain embodiments, the cancer is urothelial bladder cancer. In certain embodiments, the subject has clinical or radiological evidence of disease. In certain embodiments, the subject has measurable disease, as determined by the Response Evaluation Criteria for Solid Tumors (RECIST), version 1.1. In certain embodiments, the pharmaceutical formulation disclosed herein is administered as a monotherapy. In certain embodiments, the pharmaceutical formulation disclosed herein is administered as a combination therapy. In certain embodiments, a subject who has a confirmed complete response (CR) is treated with the pharmaceutical formulation for at least 12 months after confirmation, unless a criterion for discontinuation is met. In certain embodiments, the total duration of the multi-dose therapy is equal to or less than 24 months (e.g., 1 month, 2 months, 3 months, 4 months, 5 months, 6 months, 12 months, 18 months, 24 months). In certain embodiments, the total duration of the multi-dose therapy is more than 24 months.

[0385] In certain embodiments, the subject treated by the method disclosed herein has advanced melanoma. In certain embodiments, the subject has received treatment with an anti PD-1 antibody for at least 6 weeks and has confirmed disease progression. In certain embodiments, the subject has a BRAF activating mutation, has received a BRAF inhibitor, and has disease progression after the last line of treatment. In certain embodiments, progressive disease is confirmed by radiological or clinical observation. In certain embodiments, the subject does not have a BRAF activating mutation.

[0386] In certain embodiments, the subject treated by the method disclosed herein has advanced renal clear cell carcinoma (RCC). In certain embodiments, the subject has a clear cell histology component. In certain embodiments, the subject has received treatment with a checkpoint inhibitor, e.g., an anti PD-1/PD-L1 antibody, or a VEGF therapy as a monotherapy. In certain embodiments, the subject has received treatment with a checkpoint inhibitor, e.g., an anti PD-1/PD-L1 antibody and a VEGF therapy in combination. In certain embodiments, the subject has received treatment with a checkpoint inhibitor, e.g., an anti PD-1/PD-L1 antibody, and a platinum-based chemotherapy in combination. In certain embodiments, the subject has not received treatment with a checkpoint inhibitor, e.g., an anti PD-1/PD-L1 antibody. In certain embodiments, the subject has received more than 3 prior lines of therapy.

[0387] In certain embodiments, the subject treated by the method disclosed herein has advanced urothelial carcinoma. In certain embodiments, the advanced urothelial carcinoma is metastatic or unresectable. In certain embodiments, the subject has histologically or cytologically documented locally advanced or metastatic transitional cell carcinoma of the urothelium (including but not limited to the renal pelvis, ureters, urinary urothelial, and urethra). In certain embodiments, the subject has received only one platinum-containing regimen (e.g., platinum plus another agent, such as gemcitabine, methotrexate, vinblastine, doxorubicin, etc.). In some embodiments, the subject has not received more than one platinum-containing regimen for inoperable locally advanced or metastatic urothelial carcinoma with radiographic progression or with recurrence within 6 months after the last administration of the platinum-containing regimen as an adjuvant In certain embodiments, the subject has not received treatment with a checkpoint inhibitor (CPI) (e.g., anti-PD-1 or anti-PD-L1) as a monotherapy, or in combination with a platinum based chemotherapy. In certain embodiments, the subject has received 2 prior lines of therapy. In certain embodiments, the urothelial carcinoma is considered failure of a first-line, platinum-containing regimen.

[0388] In some embodiments, the drug delivery formulation for use in a method of treating cancer or inhibiting tumor growth comprises administration of the heterodimeric Fc-fused protein at a dose of about 0.01-about 3 μg/kg, about 0.01-about 0.02 μg/kg, about 0.01-about 0.05 μg/kg, about 0.05-about 0.1 μg/kg, about 0.05-about 0.5 μg/kg, about 0.05-about 0.75 μg/kg, about 0.05-about 1 μg/kg, about 0.05-about 1.5 μg/kg, about 0.05-about 2 μg/kg, about 0.05-about 2.5 μg/kg, about 0.05-about 3 μg/kg, about 0.1-about 3 μg/kg, about 0.1-about 1 μg/kg, about 0.5-about 1 μg/kg, about 0.1-about 2 μg/kg, about 0.5-about 2 μg/kg, about 0.1-about 0.5 μg/kg, about 0.1-about 0.25 μg/kg, about 0.2-about 1 μg/kg, about 0.2-about 2 μg/kg, about 1-about 1.2 μg/kg, about 1-about 1.5 μg/kg, about 1-about 2 μg/kg, about 1-about 2.5 μg/kg, about 0.5-about 2.5 μg/kg, about 1-about 3 μg/kg, or about 0.5-about 3 μg/kg. In certain embodiments, the drug delivery formulation for use in a method of treating cancer or inhibiting tumor growth comprises administration of the heterodimeric Fc-fused protein at a dose selected from the group consisting of about 0.01 μg/kg, about 0.02 μg/kg, about 0.03 μg/kg, about 0.04 μg/kg, about 0.05 μg/kg, about 0.1 μg/kg, about 0.15 μg/kg, about 0.2 μg/kg, about 0.25 μg/kg, about 0.3 μg/kg, about 0.35 μg/kg, about 0.4 μg/kg, about 0.45 μg/kg, about 0.5 μg/kg, about 0.6 μg/kg, about 0.7 μg/kg, about 0.8 μg/kg, about 0.9 μg/kg, about 1 μg/kg, about 1.2 μg/kg, about 1.25 μg/kg, about 1.3 μg/kg, about 1.4 μg/kg, about 1.5 μg/kg, about 1.75 μg/kg, about 2 μg/kg, about 2.5 μg/kg, about 3 μg/kg, about 4 μg/kg, or about 5 μg/kg. In certain embodiments, the dose administered is based on the subject's weight. In certain embodiments, the drug delivery formulation for use in a method of treating cancer or inhibiting tumor growth further comprises administering an anti-PD-1 antibody, e.g., pembrolizumab or nivolumab.

[0389] In some embodiments, the drug delivery formulation for use in a method of treating cancer or inhibiting tumor growth comprises the heterodimeric Fc-fused protein at an amount of about 0-about 2 mg, about 0.2-about 1.8 mg, about 0.3-about 1.7 mg, about 0.4-about 1.6 mg, about 0.5-about 1.5 mg, about 0.6-about 1.4 mg, about 0.7-about 1.3 mg, about 0.8-about 1.2 mg, or about 0.9-about 1.1 mg. In certain embodiments, the drug delivery formulation for use in a method of treating cancer or inhibiting tumor growth comprises the heterodimeric Fc-fused protein at an amount selected from the group consisting of about 0.1 mg, about 0.2 mg, about 0.3 mg, about 0.4 mg, about 0.5 mg, about 1 mg, about 2 mg, about 3 mg, about 4 mg, about 5 mg, or about 10 mg. In certain embodiments, the drug delivery formulation for use in a method of treating cancer or inhibiting tumor growth further comprises administering an anti-PD-1 antibody, e.g., pembrolizumab or nivolumab. In specific embodiments, the drug delivery formulation for use in a method of treating cancer or inhibiting tumor growth further comprises administering 200 mg of an anti-PD-1 antibody, e.g., pembrolizumab or nivolumab.

[0390] In some embodiments, the drug delivery formulation for use in a method of treating cancer or inhibiting tumor growth in a subject with advanced melanoma is administered at a dose of about 0.01-about 3 μg/kg, about 0.01-about 0.02 μg/kg, about 0.01-about 0.05 μg/kg, about 0.05-about 0.1 μg/kg, about 0.05-about 0.5 μg/kg, about 0.05-about 0.75 μg/kg, about 0.05-about 1 μg/kg, about 0.05-about 1.5 μg/kg, about 0.05-about 2 μg/kg, about 0.05-about 2.5 μg/kg, about 0.05-about 3 μg/kg, about 0.1-about 3 μg/kg, about 0.1-about 1 μg/kg, about 0.5-about 1 μg/kg, about 0.1-about 2 μg/kg, about 0.5-about 2 μg/kg, about 0.1-about 0.5 μg/kg, about 0.1-about 0.25 μg/kg, about 0.2-about 1 μg/kg, about 0.2-about 2 μg/kg, about 1-about 1.2 μg/kg, about 1-about 1.5 μg/kg, about 1-about 2 μg/kg, about 1-about 2.5 μg/kg, about 0.5-about 2.5 μg/kg, about 1-about 3 μg/kg, or about 0.5-about 3 μg/kg. In certain embodiments, the drug delivery formulation for use in a method of treating cancer or inhibiting tumor growth in a subject with advanced melanoma is administered a dose selected from the group consisting of about 0.01 μg/kg, about 0.02 μg/kg, about 0.03 μg/kg, about 0.04 μg/kg, about 0.05 μg/kg, about 0.1 μg/kg, about 0.15 μg/kg, about 0.2 μg/kg, about 0.25 μg/kg, about 0.3 μg/kg, about 0.35 μg/kg, about 0.4 μg/kg, about 0.45 μg/kg, about 0.5 μg/kg, about 0.6 μg/kg, about 0.7 μg/kg, about 0.8 μg/kg, about 0.9 μg/kg, about 1 μg/kg, about 1.2 μg/kg, about 1.25 μg/kg, about 1.3 μg/kg, about 1.4 μg/kg, about 1.5 μg/kg, about 1.75 μg/kg, about 2 μg/kg, about 2.5 μg/kg, about 3 μg/kg, about 4 μg/kg, or about 5 μg/kg.

[0391] In some embodiments, the drug delivery formulation for use in a method of treating cancer or inhibiting tumor growth in a subject with advanced melanoma comprises the heterodimeric Fc-fused protein at an amount of about 0-about 2 mg, about 0.2-about 1.8 mg, about 0.3-about 1.7 mg, about 0.4-about 1.6 mg, about 0.5-about 1.5 mg, about 0.6-about 1.4 mg, about 0.7-about 1.3 mg, about 0.8-about 1.2 mg, or about 0.9-about 1.1 mg. In certain embodiments, the drug delivery formulation for use in a method of treating cancer or inhibiting tumor growth in a subject with advanced melanoma comprises the heterodimeric Fc-fused protein at an amount selected from the group consisting of about 0.1 mg, about 0.2 mg, about 0.3 mg, about 0.4 mg, about 0.5 mg, about 1 mg, about 2 mg, about 3 mg, about 4 mg, about 5 mg, or about 10 mg.

[0392] In some embodiments, the drug delivery formulation for use in a method of treating cancer or inhibiting tumor growth in a subject with advanced RCC is administered at a dose of about 0.01-about 3 μg/kg, about 0.01-about 0.02 μg/kg, about 0.01-about 0.05 μg/kg, about 0.05-about 0.1 μg/kg, about 0.05-about 0.5 μg/kg, about 0.05-about 0.75 μg/kg, about 0.05-about 1 μg/kg, about 0.05-about 1.5 μg/kg, about 0.05-about 2 μg/kg, about 0.05-about 2.5 μg/kg, about 0.05-about 3 μg/kg, about 0.1-about 3 μg/kg, about 0.1-about 1 μg/kg, about 0.5-about 1 μg/kg, about 0.1-about 2 μg/kg, about 0.5-about 2 μg/kg, about 0.1-about 0.5 μg/kg, about 0.1-about 0.25 μg/kg, about 0.2-about 1 μg/kg, about 0.2-about 2 μg/kg, about 1-about 1.2 μg/kg, about 1-about 1.5 μg/kg, about 1-about 2 μg/kg, about 1-about 2.5 μg/kg, about 0.5-about 2.5 μg/kg, about 1-about 3 μg/kg, or about 0.5-about 3 μg/kg. In certain embodiments, the drug delivery formulation for use in a method of treating cancer or inhibiting tumor growth in a subject with advanced RCC is administered a dose selected from the group consisting of about 0.01 μg/kg, about 0.02 μg/kg, about 0.03 μg/kg, about 0.04 μg/kg, about 0.05 μg/kg, about 0.1 μg/kg, about 0.15 μg/kg, about 0.2 μg/kg, about 0.25 μg/kg, about 0.3 μg/kg, about 0.35 μg/kg, about 0.4 μg/kg, about 0.45 μg/kg, about 0.5 μg/kg, about 0.6 μg/kg, about 0.7 μg/kg, about 0.8 μg/kg, about 0.9 μg/kg, about 1 μg/kg, about 1.2 μg/kg, about 1.25 μg/kg, about 1.3 μg/kg, about 1.4 μg/kg, about 1.5 μg/kg, about 1.75 μg/kg, about 2 μg/kg, about 2.5 μg/kg, about 3 μg/kg, about 4 μg/kg, or about 5 μg/kg.

[0393] In some embodiments, the drug delivery formulation for use in a method of treating cancer or inhibiting tumor growth in a subject with advanced RCC comprises the heterodimeric Fc-fused protein at an amount of about 0-about 2 mg, about 0.2-about 1.8 mg, about 0.3-about 1.7 mg, about 0.4-about 1.6 mg, about 0.5-about 1.5 mg, about 0.6-about 1.4 mg, about 0.7-about 1.3 mg, about 0.8-about 1.2 mg, or about 0.9-about 1.1 mg. In certain embodiments, the drug delivery formulation for use in a method of treating cancer or inhibiting tumor growth in a subject with advanced RCC comprises the heterodimeric Fc-fused protein at an amount selected from the group consisting of about 0.1 mg, about 0.2 mg, about 0.3 mg, about 0.4 mg, about 0.5 mg, about 1 mg, about 2 mg, about 3 mg, about 4 mg, about 5 mg, or about 10 mg.

[0394] In some embodiments, the drug delivery formulation for use in a method of treating cancer or inhibiting tumor growth in a subject with advanced urothelial carcinoma is administered at a dose of about 0.01-about 3 μg/kg, about 0.01-about 0.02 μg/kg, about 0.01-about 0.05 μg/kg, about 0.05-about 0.1 μg/kg, about 0.05-about 0.5 μg/kg, about 0.05-about 0.75 μg/kg, about 0.05-about 1 μg/kg, about 0.05-about 1.5 μg/kg, about 0.05-about 2 μg/kg, about 0.05-about 2.5 μg/kg, about 0.05-about 3 μg/kg, about 0.1-about 3 μg/kg, about 0.1-about 1 μg/kg, about 0.5-about 1 μg/kg, about 0.1-about 2 μg/kg, about 0.5-about 2 μg/kg, about 0.1-about 0.5 μg/kg, about 0.1-about 0.25 μg/kg, about 0.2-about 1 μg/kg, about 0.2-about 2 μg/kg, about 1-about 1.2 μg/kg, about 1-about 1.5 μg/kg, about 1-about 2 μg/kg, about 1-about 2.5 μg/kg, about 0.5-about 2.5 μg/kg, about 1-about 3 μg/kg, or about 0.5-about 3 μg/kg. In certain embodiments, the drug delivery formulation for use in a method of treating cancer or inhibiting tumor growth in a subject with advanced urothelial carcinoma is administered a dose selected from the group consisting of about 0.01 μg/kg, about 0.02 μg/kg, about 0.03 μg/kg, about 0.04 μg/kg, about 0.05 μg/kg, about 0.1 μg/kg, about 0.15 μg/kg, about 0.2 μg/kg, about 0.25 μg/kg, about 0.3 μg/kg, about 0.35 μg/kg, about 0.4 μg/kg, about 0.45 μg/kg, about 0.5 μg/kg, about 0.6 μg/kg, about 0.7 μg/kg, about 0.8 μg/kg, about 0.9 μg/kg, about 1 μg/kg, about 1.2 μg/kg, about 1.25 μg/kg, about 1.3 μg/kg, about 1.4 μg/kg, about 1.5 μg/kg, about 1.75 μg/kg, about 2 μg/kg, about 2.5 μg/kg, about 3 μg/kg, about 4 μg/kg, or about 5 μg/kg.

[0395] In some embodiments, the drug delivery formulation for use in a method of treating cancer or inhibiting tumor growth in a subject with advanced urothelial carcinoma comprises the heterodimeric Fc-fused protein at an amount of about 0-about 2 mg, about 0.2-about 1.8 mg, about 0.3-about 1.7 mg, about 0.4-about 1.6 mg, about 0.5-about 1.5 mg, about 0.6-about 1.4 mg, about 0.7-about 1.3 mg, about 0.8-about 1.2 mg, or about 0.9-about 1.1 mg. In certain embodiments, the drug delivery formulation for use in a method of treating cancer or inhibiting tumor growth in a subject with advanced urothelial carcinoma comprises the heterodimeric Fc-fused protein at an amount selected from the group consisting of about 0.1 mg, about 0.2 mg, about 0.3 mg, about 0.4 mg, about 0.5 mg, about 1 mg, about 2 mg, about 3 mg, about 4 mg, about 5 mg, or about 10 mg.

[0396] In certain embodiments, the subject treated in accordance with the methods disclosed herein has not received prior therapy for treating the cancer. In certain embodiments, the subject treated in accordance with the methods disclosed herein has not received prior chemotherapy or immunotherapy for treating the cancer. In certain embodiments, the subject treated in accordance with the methods disclosed herein has received a prior therapy (e.g., a chemotherapy or immunotherapy) but continues to experience cancer progression despite the prior therapy. In certain embodiments, the subject treated in accordance with the methods disclosed herein has experienced cancer regression after receiving a prior therapy (e.g., a chemotherapy or immunotherapy), but later experienced cancer relapse. In certain embodiments, the subject treated in accordance with the methods disclosed herein is intolerant to a prior therapy (e.g., a chemotherapy or immunotherapy).

[0397] In certain embodiments, the subject treated in accordance with the methods disclosed herein meets all the inclusion criteria of a clinical trial cohort (e.g., the dose escalation cohort, the dose expansion cohorts, the melanoma cohort, the renal cell carcinoma cohort, the urothelial carcinoma cohort, or the combination therapy with pembrolizumab or nivolumab cohorts) described in Examples 26 and 29. In certain embodiments, the subject treated in accordance with the methods disclosed herein does not meet any of the exclusion criteria described in Examples 26 and 29.

[0398] The heterodimeric Fc-fused protein disclosed herein can be used as a monotherapy or in combination with one or more therapies. In certain embodiments, the heterodimeric Fc-fused protein is used as a monotherapy in accordance with the dosage regimen disclosed herein. In other embodiments, the heterodimeric Fc-fused protein is used in combination with one or more therapies, wherein the heterodimeric Fc-fused protein is administered in accordance with a dosage regimen disclosed herein and the one or more therapies are administered in accordance with a dosage regimen known to be suitable for treating the particular subject with the particular cancer. In certain embodiments, the method of treatment disclosed herein is used as an adjunct to surgical removal of the primary lesion. In certain embodiments, a surgical intervention of the primary lesion comprises lysing cancer cells, removing a tumor, or debulking a tumor in the subject.

[0399] Exemplary therapeutic agents that may be used in combination with the heterodimeric Fc-fused protein include, for example, radiation, mitomycin, tretinoin, ribomustin, gemcitabine, vincristine, etoposide, cladribine, mitobronitol, methotrexate, doxorubicin, carboquone, pentostatin, nitracrine, zinostatin, cetrorelix, letrozole, raltitrexed, daunorubicin, fadrozole, fotemustine, thymalfasin, sobuzoxane, nedaplatin, cytarabine, bicalutamide, vinorelbine, vesnarinone, aminoglutethimide, amsacrine, proglumide, elliptinium acetate, ketanserin, doxifluridine, etretinate, isotretinoin, streptozocin, nimustine, vindesine, flutamide, drogenil, butocin, carmofur, razoxane, sizofilan, carboplatin, mitolactol, tegafur, ifosfamide, prednimustine, picibanil, levamisole, teniposide, improsulfan, enocitabine, lisuride, oxymetholone, tamoxifen, progesterone, mepitiostane, epitiostanol, formestane, interferon-alpha, interferon-2 alpha, interferon-beta, interferon-gamma (IFN-7), colony stimulating factor-1, colony stimulating factor-2, denileukin diftitox, interleukin-2, luteinizing hormone releasing factor and variations of the aforementioned agents that may exhibit differential binding to their cognate receptors, or increased or decreased serum half-life.

[0400] An additional class of agents that may be used as part of a combination therapy in treating cancer is immune checkpoint inhibitors. Exemplary immune checkpoint inhibitors include agents that inhibit one or more of (i) cytotoxic T lymphocyte-associated antigen 4 (CTLA4), (ii) programmed cell death protein 1 (PD1), (iii) PDL1, (iv) LAG3, (v) B7-H3, (vi) B7-H4, and (vii) TIM3. The CTLA4 inhibitor ipilimumab has been approved by the United States Food and Drug Administration for treating melanoma.

[0401] Yet other agents that may be used as part of a combination therapy in treating cancer are monoclonal antibody agents that target non-checkpoint targets (e.g., herceptin) and non-cytotoxic agents (e.g., tyrosine-kinase inhibitors).

[0402] Yet other categories of anti-cancer agents include, for example: (i) an inhibitor selected from an ALK Inhibitor, an ATR Inhibitor, an A2A Antagonist, a Base Excision Repair Inhibitor, a Bcr-Abl Tyrosine Kinase Inhibitor, a Bruton's Tyrosine Kinase Inhibitor, a CDC7 Inhibitor, a CHK1 Inhibitor, a Cyclin-Dependent Kinase Inhibitor, a DNA-PK Inhibitor, an Inhibitor of both DNA-PK and mTOR, a DNMT1 Inhibitor, a DNMT1 Inhibitor plus 2-chloro-deoxyadenosine, an HDAC Inhibitor, a Hedgehog Signaling Pathway Inhibitor, an IDO Inhibitor, a JAK Inhibitor, a mTOR Inhibitor, a MEK Inhibitor, a MELK Inhibitor, a MTH1 Inhibitor, a PARP Inhibitor, a Phosphoinositide 3-Kinase Inhibitor, an Inhibitor of both PARP1 and DHODH, a Proteasome Inhibitor, a Topoisomerase-II Inhibitor, a Tyrosine Kinase Inhibitor, a VEGFR Inhibitor, and a WEE1 Inhibitor; (ii) an agonist of OX40, CD137, CD40, GITR, CD27, HVEM, TNFRSF25, or ICOS; and (iii) a cytokine selected from IL-12, IL-15, GM-CSF, and G-CSF.

[0403] In certain embodiments, the cancer treated with a single dose or more of a heterodimeric IL-12-Fc-fused protein (e.g., comprising a first polypeptide comprising the amino acid sequence of SEQ ID NO:290 and a second polypeptide comprising the amino acid sequence of SEQ ID NO:291) is a metastatic cancer. In certain embodiments, the metastatic cancer is a local, regional, or distant metastatic cancer. In certain embodiments, a single or multiple dose of a heterodimeric IL-12-Fc-fused protein (e.g., comprising a first polypeptide comprising the amino acid sequence of SEQ ID NO:290 and a second polypeptide comprising the amino acid sequence of SEQ ID NO:291) treats a distant cancer, which is not the primary cancer of the source organ or tissue and/or the direct target of a treatment regimen, by an abscopal effect. In certain embodiments the abscopal effect of a heterodimeric IL-12-Fc-fused protein is enhanced during and/or after a treatment plan including radiation and/or chemotherapy. In certain embodiments, a single or multiple dose of a heterodimeric IL-12-Fc-fused protein (e.g., comprising a first polypeptide comprising the amino acid sequence of SEQ ID NO:290 and a second polypeptide comprising the amino acid sequence of SEQ ID NO:291) treats cancer in a patient by inducing a systemic anti-tumor response, determined, for example, by increased expression of IFNγ, CXCL9, and/or CXCL10 in the serum and/or the tumor of the patient.

### Combination Therapy

[0404] Another aspect of the invention provides for combination therapy. A pharmaceutical formulation comprising a heterodimeric Fc fused protein described herein can be used in combination with additional therapeutic agents to treat the cancer.

[0405] In certain embodiments, the heterodimeric Fc-fused protein of the present invention (e.g., a heterodimeric Fc-fused protein comprising IL-12 subunits) is administered as a combination therapy to treat a subject diagnosed with cancer. In certain embodiments, the cancer is bladder cancer, breast cancer, cervical cancer, colorectal cancer, oesophageal cancer, gastric cancer, head and neck cancer, hepatocellular carcinoma, leukemia, lung cancer, lymphoma, mesothelioma, melanoma, myeloma, ovarian cancer, endometrial carcinoma, prostate cancer, pancreatic cancer, renal cell carcinoma (RCC), non-small cell lung cancer (NSCLC), small cell lung cancer (SCLC), brain cancer, sarcoma, neuroblastoma, classical Hodgkin lymphoma, primary mediastinal large B-Cell lymphoma, urothelial carcinoma, micro-satellite instability high cancer, Merkel cell carcinoma, endometrial carcinoma, cutaneous T cell lymphoma, triple negative breast cancer, or head and neck squamous cell carcinoma (HNSCC). In certain embodiments, the cancer is colon cancer. In certain embodiments, the heterodimeric Fc-fused protein is administered as a combination therapy to a subject diagnosed with colon cancer. In certain embodiments, the cancer is melanoma. In certain embodiments, the heterodimeric Fc-fused protein is administered as a combination therapy to a subject diagnosed with melanoma. In certain embodiments, the cancer is breast cancer. In certain embodiments, the heterodimeric Fc-fused protein is administered as a combination therapy to a subject diagnosed with breast cancer.

[0406] In some embodiments, a heterodimeric Fc-fused protein of the present invention (e.g., a heterodimeric Fc-fused protein comprising IL-12 subunits) is used in treating an advanced malignancy in combination with another therapeutic agent selected from: cytotoxic chemotherapy; radiotherapy; an antibody that targets a molecule involved in an anti-tumor immune response, such as CTLA-4, PD-1, PD-L1, or TGF-β; an antibody that acts by ADCC on a tumor-associated antigen; a multispecific antibody binding NKG2D, CD16, and a tumor-associated antigen, optionally administered in combination with an antibody that targets PD-1 or PD-L1; a personalized cancer vaccine; an oncolytic cancer vaccine; and a personalized vaccine administered in combination with an antibody that targets PD-1 or PD-L1.

[0407] In some embodiments, a heterodimeric Fc-fused protein of the present invention (e.g., a heterodimeric Fc-fused protein comprising IL-12 subunits) is used in treating malignancy (e.g., an advanced malignancy) in combination with another therapy including, but not limited to, an NK-targeting therapy (e.g., CAR-NK therapy), an antibody therapy, a checkpoint inhibitor therapy, an additional cytokine therapy, an innate immune system agonist therapy, a chemotherapy, a target agent therapy, a radiotherapy, an adoptive NK therapy, a stem cell transplant (SCT) therapy, an agonistic antibody, a chimeric antigen receptor (CAR) T cell therapy, a T-cell receptor (TCR) engineered therapy, a multi-specific binding protein (TriNKET), an agent that induces cellular senescence, and a vaccine and/or oncolytic virus therapy. In some embodiments, a heterodimeric Fc-fused protein of the present invention is used in treating malignancy (e.g., an advanced malignancy) in combination with two or more additional therapies selected from an NK-targeting therapy (e.g., CAR-NK therapy), an antibody therapy, a checkpoint inhibitor therapy, an additional cytokine therapy, an innate immune system agonist therapy, a chemotherapy, a target agent therapy, a radiotherapy, an adoptive NK therapy, a stem cell transplant (SCT) therapy, an agonistic antibody, a chimeric antigen receptor (CAR) T cell therapy, a T-cell receptor (TCR) engineered therapy, a multi-specific binding protein (TriNKET), an agent that induces cellular senescence, and a vaccine and/or oncolytic virus therapy.

[0408] In some embodiments, a heterodimeric Fc-fused protein of the present invention (e.g., a heterodimeric Fc-fused protein comprising IL-12) is used in treating locally advanced malignancy that can be fully resected, in combination with a cancer vaccine or an antibody that targets PD-1 or PD-L1.

[0409] Proteins of the invention can also be used as an adjunct to surgical removal of the primary lesion.

[0410] The amount of heterodimeric Fc-fused protein of the present invention (e.g., a heterodimeric Fc-fused protein comprising IL-12) and additional therapeutic agent and the relative timing of administration may be selected in order to achieve a desired combined therapeutic effect. For example, when administering a combination therapy to a patient in need of such administration, the therapeutic agents in the combination, a pharmaceutical formulation or formulations comprising the therapeutic agents, or a pharmaceutical composition or compositions comprising the therapeutic agents, may be administered in any order such as, for example, sequentially, concurrently, together, simultaneously and the like. Further, for example, a heterodimeric Fc-fused protein may be administered during a time when the additional therapeutic agent(s) exerts its prophylactic or therapeutic effect, or vice versa.

[0411] As disclosed herein, the methods of the invention include coadministration of the combination of a heterodimeric Fc-fused protein (e.g., a heterodimeric Fc-fused protein comprising IL-12 subunits) and an additional therapeutic agent. As disclosed herein, the methods of the invention include coadministration of the combination of a heterodimeric Fc-fused protein comprising IL-12 subunits and an additional therapeutic agent.

[0412] “Coadministered” encompasses methods where a heterodimeric Fc-fused protein (e.g., a heterodimeric Fc-fused protein comprising IL-12 subunits) and an additional therapeutic agent are given simultaneously, where a heterodimeric Fc-fused protein and an additional therapeutic agent are given sequentially, and where either one of, or both of, a heterodimeric Fc-fused protein and an additional therapeutic agent are given intermittently or continuously, or any combination of: simultaneously, sequentially, intermittently and/or continuously. The skilled artisan will recognize that intermittent administration is not necessarily the same as sequential because intermittent also includes a first administration of an agent and then another administration later in time of that very same agent. Moreover, the skilled artisan understands that intermittent administration also encompasses sequential administration in some embodiments because intermittent administration does include interruption of the first administration of an agent with an administration of a different agent before the first agent is administered again. Further, the skilled artisan will also know that continuous administration can be accomplished by a number of routes including intravenous drip (IV infusion) or feeding tubes, etc.

[0413] Furthermore, and in a more general way, the term “coadministered” encompasses any and all methods where the individual administration of a heterodimeric Fc-fused protein and the individual administration of an additional therapeutic agent to a subject overlap during any timeframe.

[0414] The frequency of administration of a heterodimeric Fc-fused protein or an additional therapeutic agent to a subject is known in the art as Qnd or qnd where n is the frequency in days for successive administration of that agent. For example, Q3d would be an administration of an agent once every three (3) days. In certain embodiments, the method comprises administering either one of, or both of, or any combinations thereof, a heterodimeric Fc-fused protein and/or an additional therapeutic agent to a subject for Q1d, Q2d, Q3d, Q4d, Q5d, Q6d, Q7d, Q8d, Q9d, Q10d, Q14d, Q21d, Q28d, Q30d, Q90d, Q120d, Q240d, or Q365d.

[0415] In certain embodiments, either one of or both of a heterodimeric Fc-fused protein and/or an additional therapeutic agent are administered intermittently. In certain embodiments, the method includes administering either one of, or both of a heterodimeric Fc-fused protein or an additional therapeutic agent to a subject with a delay of at least 10 minutes, 15 minutes, 20 minutes, 30 minutes, 40 minutes, 60 minutes, 2 hours, 3 hours, 4 hours, 6 hours, 8 hours, 10 hours, 12 hours, 14 hours, 18 hours, 24 hours, 36 hours, 48 hours, 3 days, 4 days, 5 days, 6 days, 7 days, 8 days, 9 days, 10 days, 11 days, 12 days, 13 days, 14 days, 3 weeks, or 4 weeks between administrations. In certain embodiments, the administration with a delay follows a pattern where one of, or both of, or any combination thereof, of a heterodimeric Fc-fused protein and/or an additional therapeutic agent are administered continuously for a given period of time from about 10 minutes to about 365 days and then is not administered for a given period of time from about 10 minutes to about 30 days.

[0416] In certain embodiments, either one of, or any combination of, a heterodimeric Fc-fused protein and/or an additional therapeutic agent are administered intermittently while the other is given continuously. In certain embodiments, the combination of the first effective amount of a heterodimeric Fc-fused protein is administered sequentially with the second effective amount of an additional therapeutic agent.

[0417] In certain embodiments, a heterodimeric Fc-fused protein and an additional therapeutic agent are administered simultaneously. In certain embodiments, the combination of the first effective amount of a heterodimeric Fc-fused protein is administered sequentially with the second effective amount of an additional therapeutic agent. In such embodiments, the combination is also said to be “coadministered” since the term includes any and all methods where the subject is exposed to both components in the combination. However, such embodiments are not limited to the combination being given just in one formulation or composition. It may be that certain concentrations of a heterodimeric Fc-fused protein and the additional therapeutic agent are more advantageous to deliver at certain intervals and as such, the first effective amount and second effective amount may change according to the formulation being administered.

[0418] In certain embodiments, a heterodimeric Fc-fused protein and the additional therapeutic agent are administered simultaneously or sequentially. In certain embodiments, the first effective amount of a heterodimeric Fc-fused protein is administered sequentially after the second effective amount of an additional therapeutic agent. In certain embodiments, the second effective amount of an additional therapeutic agent is administered sequentially after the first effective amount of a heterodimeric Fc-fused protein.

[0419] In certain embodiments, the combination of a heterodimeric Fc-fused protein (e.g., a heterodimeric Fc-fused protein comprising IL-12 subunits) and an additional therapeutic agent is administered in one formulation. In certain embodiments, the combination is administered in two (2) compositions where the first effective amount of a heterodimeric Fc-fused protein is administered in a separate formulation from the formulation of the second effective amount of an additional therapeutic agent. In certain embodiments, the combination is administered in two (2) compositions where the first effective amount of the heterodimeric Fc-fused protein is administered in a separate formulation from the formulation of the second effective amount of an additional therapeutic agent. In certain embodiments, the first effective amount of a heterodimeric Fc-fused protein is administered sequentially after the second effective amount of an additional therapeutic agent. In certain embodiments, the second effective amount of an additional therapeutic agent is administered sequentially after the first effective amount of a heterodimeric Fc-fused protein. In certain embodiments, a heterodimeric Fc-fused protein and the additional therapeutic agent are administered; and subsequently both the heterodimeric Fc-fused protein and the additional therapeutic agent are administered intermittently for at least 24 hours. In certain embodiments, the heterodimeric Fc-fused protein and the additional therapeutic agent are administered on a non-overlapping every other day schedule.

[0420] In certain embodiments, the first effective amount of a heterodimeric Fc-fused protein is administered no less than 4 hours after the second effective amount of an additional therapeutic agent. In certain embodiments, the first effective amount of a heterodimeric Fc-fused protein is administered no less than 10 minutes, no less than 15 minutes, no less than 20 minutes, no less than 30 minutes, no less than 40 minutes, no less than 60 minutes, no less than 1 hour, no less than 2 hours, no less than 4 hours, no less than 6 hours, no less than 8 hours, no less than 10 hours, no less than 12 hours, no less than 24 hours, no less than 2 days, no less than 4 days, no less than 6 days, no less than 8 days, no less than 10 days, no less than 12 days, no less than 14 days, no less than 21 days, or no less than 30 days after the second effective amount of an additional therapeutic agent. In In certain embodiments, the second effective amount of an additional therapeutic agent is administered no less than 10 minutes, no less than 15 minutes, no less than 20 minutes, no less than 30 minutes, no less than 40 minutes, no less than 60 minutes, no less than 1 hour, no less than 2 hours, no less than 4 hours, no less than 6 hours, no less than 8 hours, no less than 10 hours, no less than 12 hours, no less than 24 hours, no less than 2 days, no less than 4 days, no less than 6 days, no less than 8) days, no less than 10 days, no less than 12 days, no less than 14 days, no less than 21 days, or no less than 30 days after the first effective amount of a heterodimeric Fc-fused protein.

[0421] In certain embodiments, either one of, or both of a heterodimeric Fc-fused protein and/or additional therapeutic agent are administered by a route selected from the group consisting of: intravenous, subcutaneous, cutaneous, oral, intramuscular, and intraperitoneal. In certain embodiments, either one of, or both of a heterodimeric Fc-fused protein and/or additional therapeutic agent are administered by intravenously. In certain embodiments, either one of, or both of, or any combination thereof, a heterodimeric Fc-fused protein and/or additional therapeutic agent are administered orally.

[0422] It is understood by the skilled artisan that the unit dose forms of the present disclosure may be administered in the same or different physical forms, i.e. orally via capsules or tablets and/or by liquid via IV infusion, and so on. Moreover, the unit dose forms for each administration may differ by the particular route of administration. Several various dosage forms may exist for either one of, or both of, the combination of a heterodimeric Fc-fused protein and additional therapeutic agents. Because different medical conditions can warrant different routes of administration, the same components of the combination described herein may be exactly alike in composition and physical form and yet may need to be given in differing ways and perhaps at differing times to alleviate the condition. For example, a condition such as persistent nausea, especially with vomiting, can make it difficult to use an oral dosage form, and in such a case, it may be necessary to administer another unit dose form, perhaps even one identical to other dosage forms used previously or afterward, with an inhalation, buccal, sublingual, or suppository route instead or as well. The specific dosage form may be a requirement for certain combinations of a heterodimeric Fc-fused protein and additional therapeutic agents, as there may be issues with various factors like chemical stability or pharmacokinetics.
[0423] (i) NK-Targeting Therapy

[0424] In certain embodiments, the heterodimeric Fc-fused protein therapy is combined with NK targeting therapies. For example, in an embodiment, the heterodimeric Fc-fused protein is coadministered with a therapeutic agent that targets NKp46. In certain embodiments, the therapeutic agent that targets NKp46 also binds CD16, one or more tumor-associated antigens, or a combination thereof. Exemplary therapeutic agents that target NKp46 are described in more detail in U.S. Application No. US20170198038A1, herein incorporated by reference for all purposes.

[0425] In certain embodiments, the heterodimeric Fc-fused protein therapy is combined with bi- and tri-specific killer engagers (BiKEs and TriKEs) therapies, including BiKE and TriKE therapies targeting NK cells. BiKEs and TriKEs are constructed from a single heavy (VH) and light (VL) chain of the variable region of each antibody of interest. VH and VL domains are joined by a short flexible polypeptide linker to prevent dissociation. BiKEs and TriKEs are described in more detail in U.S. Application Nos. US20180282386A1 and US20180258396A1, herein incorporated by reference for all purposes. BiKEs and TriKEs can contain a binding domain specific for an NK cell.

[0426] In certain embodiments, BiKE and TriKE therapies are used in combination with the heterodimeric Fc-fused protein therapy to treat subjects known or suspected of having High-risk Myelodysplastic Syndrome, Acute Myelogenous Leukemia, Systemic Mastocytosis, or Mast Cell Leukemia. In certain embodiments, BiKE and TriKE therapies are administered as a single course of 3 weekly treatment blocks. In certain embodiments, a treatment block comprises 4 consecutive 24-hour continuous infusions (approximately 96 hours) followed by a 72 hour break. In certain embodiments, BiKE and TriKE therapies are administered at a dose of 5 μg/kg/day, 10 μg/kg/day, 25 μg/kg/day, 50 μg/kg/day, 100 μg/kg/day, or 200 μg/kg/day. In certain embodiments, BiKE and TriKE therapies are administered at a dose of at least 5 μg/kg/day, at least 10 μg/kg/day, at least 25 μg/kg/day, at least 50 μg/kg/day, at least 100 μg/kg/day, or at least 200 μg/kg/day. In certain embodiments, BiKE and TriKE therapies are administered at a dose of at least 1 μg/kg/day. In certain embodiments, BiKE and TriKE therapies are administered at a dose of at least 5 μg/kg/day. In certain embodiments, BiKE and TriKE therapies are administered at a dose of at least 200 μg/kg/day. In certain embodiments, BiKE and TriKE therapies are administered at a dose of at least 500 μg/kg/day. In certain embodiments, BiKE and TriKE therapies are administered at a dose of at least 1000 μg/kg/day. In certain embodiments, BiKE and TriKE therapies are administered at a dose of 200 μg/kg/day or less. In certain embodiments, BiKE and TriKE therapies are administered at a dose of 500 μg/kg/day or less. In certain embodiments, BiKE and TriKE therapies are administered at a dose of 1000 μg/kg/day or less. In certain embodiments, BiKE and TriKE therapies are administered at a dose of 1-200 μg/kg/day. In certain embodiments, BiKE and TriKE therapies are administered at a dose of 5-200 μg/kg/day. In certain embodiments, BiKE and TriKE therapies are administered at a dose of 1-500 μg/kg/day. In certain embodiments, BiKE and TriKE therapies are administered at a dose of 1-1000 μg/kg/day. In certain embodiments, BiKE and TriKE therapies are administered at a dose of 5-500 μg/kg/day. In certain embodiments, BiKE and TriKE therapies are administered at a dose of 5-1000 μg/kg/day. In certain embodiments, BiKE and TriKE therapies are administered at a maximum-tolerated dose. In certain embodiments, BiKE and TriKE therapies are administered at less than maximum-tolerated dose.
[0427] (ii) Multi-specific Binding Protein (“TriNKET”) Therapy

[0428] In certain embodiments, the heterodimeric Fc-fused protein therapy is combined with a therapy comprising a multi-specific binding protein, which comprises: (a) a first antigen-binding site that binds NKG2D; (b) a second antigen-binding site that binds a tumor-associated antigen; and (c) an antibody Fc domain or a portion thereof sufficient to bind CD16, or a third antigen-binding site that binds CD16 (“TriNKET”) (for example, multi-specific binding proteins comprising various NKG2D-binders and tumor-associated antigen-binding sites described in international publication no. WO 2019/157332, whose contents relating to the multi-specific binding proteins described therein are incorporated by reference herein), to treat subjects known or suspected of having cancer. Exemplary tumor-associated antigens include, but are not limited to, HER2, CD20, CD33, B-cell maturation antigen (BCMA), EpCAM, CD2, CD19, CD25, CD30, CD38, CD40, CD52, CD70, CLL1/CLEC12A, FLT3, EGFR/ERBB1, IGF1R, HER3/ERBB3, HER4/ERBB4, MUC1, cMET, SLAMF7, PSCA, MICA, MICB, TRAILR1, TRAILR2, MAGE-A3, B7.1, B7.2, CTLA4, HLA-E, and PD-L1.

[0429] In certain embodiments, the heterodimeric Fc-fused protein therapy is combined with a therapy comprising a dose of a multi-specific binding protein based on body weight. For example, doses of a multi-specific binding protein based on body weight are from about 0.01 μg to about 100 mg per kg of body weight, such as about 0.01 μg to about 100 mg/kg of body weight, about 0.01 μg to about 50 mg/kg of body weight, about 0.01 μg to about 10 mg/kg of body weight, about 0.01 μg to about 1 mg/kg of body weight, about 0.01 μg to about 100 μg/kg of body weight, about 0.01 μg to about 50 μg/kg of body weight, about 0.01 μg to about 10 μg/kg of body weight, about 0.01 μg to about 1 μg/kg of body weight, about 0.01 μg to about 0.1 μg/kg of body weight, about 0.1 μg to about 100 mg/kg of body weight, about 0.1 μg to about 50 mg/kg of body weight, about 0.1 μg to about 10 mg/kg of body weight, about 0.1 μg to about 1 mg/kg of body weight, about 0.1 μg to about 100 μg/kg of body weight, about 0.1 μg to about 10 μg/kg of body weight, about 0.1 μg to about 1 μg/kg of body weight, about 1 μg to about 100 mg/kg of body weight, about 1 μg to about 50 mg/kg of body weight, about 1 μg to about 10 mg/kg of body weight, about 1 μg to about 1 mg/kg of body weight, about 1 μg to about 100 μg/kg of body weight, about 1 μg to about 50 μg/kg of body weight, about 1 μg to about 10 μg/kg of body weight, about 10 μg to about 100 mg/kg of body weight, about 10 μg to about 50 mg/kg of body weight, about 10 μg to about 10 mg/kg of body weight, about 10 μg to about 1 mg/kg of body weight, about 10 μg to about 100 μg/kg of body weight, about 10 μg to about 50 μg/kg of body weight, about 50 μg to about 100 mg/kg of body weight, about 50 μg to about 50 mg/kg of body weight, about 50 μg to about 10 mg/kg of body weight, about 50 μg to about 1 mg/kg of body weight, about 50 μg to about 100 μg/kg of body weight, about 100 μg to about 100 mg/kg of body weight, about 100 μg to about 50 mg/kg of body weight, about 100 μg to about 10 mg/kg of body weight, about 100 μg to about 1 mg/kg of body weight, about 1 mg to about 100 mg/kg of body weight, about 1 mg to about 50 mg/kg of body weight, about 1 mg to about 10 mg/kg of body weight, about 10 mg to about 100 mg/kg of body weight, about 10 mg to about 50 mg/kg of body weight, about 50 mg to about 100 mg/kg of body weight.

[0430] In certain embodiments, the heterodimeric Fc-fused protein therapy is combined with a therapy comprising doses of a multi-specific binding protein given once or more times daily, weekly, monthly or yearly, or even once every 2 to 20 years. Persons of ordinary skill in the art can easily estimate repetition rates for dosing based on measured residence times and concentrations of the targetable construct or complex in bodily fluids or tissues. Administration of a multi-specific binding protein could be intravenous, intraarterial, intraperitoneal, intramuscular, subcutaneous, intrapleural, intrathecal, intracavitary, by perfusion through a catheter or by direct intralesional injection. This may be administered once or more times daily, once or more times weekly, once or more times monthly, and once or more times annually.
[0431] (iii) Chimeric antigen receptors (CARs) Therapy

[0432] In certain embodiments, the heterodimeric Fc-fused protein therapy is combined with a CAR therapy. The term “chimeric antigen receptor” or alternatively a “CAR” refers to a recombinant polypeptide construct comprising at least an extracellular antigen binding domain, a transmembrane domain and an intracellular signaling domain comprising a functional signaling domain derived from a stimulatory molecule (also referred to herein as a “primary signaling domain”).

[0433] Accordingly, in certain embodiments, the CAR comprises an extracellular antigen-binding site that binds tumor-associated antigen, a transmembrane domain, and an intracellular signaling domain comprising a primary signaling domain. In certain embodiments, the CAR further comprises one or more functional signaling domains derived from at least one costimulatory molecule (also referred to as a “costimulatory signaling domain”).

[0434] In one embodiment, the CAR comprises a chimeric fusion protein comprising a tumor-associated antigen-binding domain (e.g., tumor-associated antigen-binding scFv domain) comprising a heavy chain variable domain and a light chain variable domain as an extracellular antigen binding domain, a transmembrane domain, and an intracellular signaling domain comprising a primary signaling domain. In one embodiment, the CAR comprises a chimeric fusion protein comprising a tumor-associated antigen-binding domain (e.g., tumor-associated antigen-binding scFv domain) comprising a heavy chain variable domain and a light chain variable domain as an extracellular antigen binding domain, a transmembrane domain and an intracellular signaling domain comprising a costimulatory signaling domain and a primary signaling domain. In certain embodiments, the CAR comprises a chimeric fusion protein comprising a tumor-associated antigen-binding domain (e.g., tumor-associated antigen-binding scFv domain) comprising a heavy chain variable domain and a light chain variable domain as an extracellular antigen binding domain, a transmembrane domain, and an intracellular signaling domain comprising two costimulatory signaling domains and a primary signaling domain. In one embodiment, the CAR comprises a chimeric fusion protein comprising a tumor-associated antigen-binding domain comprising a heavy chain variable domain and a light chain variable domain as an extracellular antigen binding domain, a transmembrane domain, and an intracellular signaling domain comprising at least two costimulatory signaling domains and a primary signaling domain.

[0435] With respect to the transmembrane domain, in various embodiments, the CAR is designed to comprise a transmembrane domain that is fused to the extracellular domain of the CAR. In one embodiment, the transmembrane domain is one that naturally is associated with one of the domains in the CAR. In some instances, the transmembrane domain can be selected or modified by amino acid substitution to avoid binding of such domains to the transmembrane domains of the same or different surface membrane proteins to minimize interactions with other members of the receptor complex. In another embodiment, the transmembrane domain is capable of homodimerization with another CAR on the CAR T cell surface. In another embodiment, the amino acid sequence of the transmembrane domain may be modified or substituted so as to minimize interactions with the binding domains of the native binding partner present in the same CAR T cell.

[0436] The transmembrane domain may be derived from any naturally occurring membrane-bound or transmembrane protein. In one embodiment, the transmembrane region is capable of signaling to the intracellular domain(s) whenever the CAR has bound to a target. In some embodiments, the transmembrane domain comprises the transmembrane region(s) of one or more proteins selected from the group consisting of TCR α chain, TCR β chain, TCR ζ chain, CD28, CD3ε, CD45, CD4, CD5, CD8, CD9, CD16, CD22, CD33, CD37, CD64, CD80, CD86, CD134, CD137, and CD154. In some embodiments, the transmembrane domain comprises the transmembrane region(s) of one or more protein(s) selected from the group consisting of KIRDS2, OX40, CD2, CD27, LFA-1 (CD11a, CD18), ICOS (CD278), 4-1BB (CD137), GITR, CD40, BAFFR, HVEM (LIGHTR), SLAMF7, NKp80 (KLRF1), NKp44, NKp30, NKp46, CD160, CD19, IL2Rβ, IL2Rγ, IL7Rα, ITGA1, VLA1, CD49a, ITGA4, IA4, CD49D, ITGA6, VLA-6, CD49f, ITGAD, CD11 d, ITGAE, CD103, ITGAL, CD11a, LFA-1, ITGAM, CD11b, ITGAX, CD11c, ITGB1, CD29, ITGB2, CD18, LFA-1, ITGB7, TNFR2, DNAM1 (CD226), SLAMF4 (CD244, 2B4), CD84, CD96 (Tactile), CEACAM1, CRTAM, Ly9 (CD229), CD160 (BY55), PSGL1, CD100 (SEMA4D), SLAMF6 (NTB-A, Ly108), SLAM (SLAMF1, CD150, IPO-3), BLAME (SLAMF8), SELPLG (CD162), LTBR, PAG/Cbp, NKG2D, and NKG2C.

[0437] The extracellular tumor-associated antigen-binding domain (e.g., tumor-associated antigen-binding scFv domain) can be connected to the transmembrane domain by a hinge region. A variety of hinges can be employed, including but not limited to the human Ig hinge (e.g., an IgG4 hinge, an IgD hinge), a Gly-Ser linker, a (G₄S)₄ linker, a KIR2DS2 hinge, and a CD8α hinge.

[0438] The intracellular signaling domain of the CAR is responsible for activation of at least one of the specialized functions of the immune cell (e.g., cytolytic activity or helper activity, including the secretion of cytokines, of a T cell) in which the CAR has been placed in. Thus, as used herein, the term “intracellular signaling domain” refers to the portion of a protein which transduces an effector function signal and directs the cell to perform a specialized function. While usually the entire intracellular signaling domain can be employed, in many cases it is not necessary to use the entire chain. To the extent that a truncated portion of the intracellular signaling domain is used, such truncated portion may be used in place of the intact chain as long as it transduces the effector function signal. The term intracellular signaling domain is thus meant to include any truncated portion of the intracellular signaling domain sufficient to transduce the effector function signal.

[0439] The intracellular signaling domain of the CAR comprises a primary signaling domain (i.e. a functional signaling domain derived from a stimulatory molecule) and one or more costimulatory signaling domains (i.e. functional signaling domains derived from at least one costimulatory molecule).

[0440] As used herein, the term “stimulatory molecule” refers to a molecule expressed by an immune cell, e.g., a T cell, an NK cell, or a B cell, that provide the cytoplasmic signaling sequence(s) that regulate activation of the immune cell in a stimulatory way for at least some aspect of the immune cell signaling pathway. In one embodiment, the signal is a primary signal that is initiated by, for instance, binding of a TCR/CD3 complex with an MHC molecule loaded with a peptide, and which leads to mediation of a T cell response, including, but not limited to, proliferation, activation, differentiation, and the like.

[0441] Primary signaling domains that act in a stimulatory manner may contain signaling motifs which are known as immunoreceptor tyrosine-based activation motifs or ITAMs. Examples of ITAM containing cytoplasmic signaling sequences that are of particular use in the present disclosure include those derived from CD3 zeta, common FcR gamma (FCER1G), Fc gamma RIIa, FcR beta (Fc Epsilon R1b), CD3 gamma, CD3 delta, CD3 epsilon, CD79a, CD79b, DAP10, and DAP12. In one embodiment, the primary signaling domain in any one or more CARs comprises a cytoplasmic signaling sequence derived from CD3-zeta.

[0442] In some embodiments, the primary signaling domain is a functional signaling domain of TCR zeta, FcR gamma, FcR beta, CD3 gamma, CD3 delta, CD3 epsilon, CD5, CD22, CD79a, CD79b, CD66d, 4-1BB, and/or CD3-zeta. In an embodiment, the intracellular signaling domain comprises a functional signaling domain of CD3 zeta, common FcR gamma (FCER1G), Fc gamma RIIa, FcR beta (Fc Epsilon R1b), CD3 gamma, CD3 delta, CD3 epsilon, CD79a, CD79b, DAP10, and/or DAP12. In a particular embodiment, the primary signaling domain is a functional signaling domain of the zeta chain associated with the T cell receptor complex.

[0443] As used herein, the term “costimulatory molecule” refers to a cognate binding partner on a T cell that specifically binds with a costimulatory ligand, thereby mediating a costimulatory response by the T cell, such as, but not limited to, proliferation. A costimulatory molecule is a cell surface molecule other than an antigen receptor or its ligands that is required for an efficient response of lymphocytes to an antigen. Examples of such molecules include CD27, CD28, 4-1BB (CD137), OX40, CD30, CD40, PD-1, ICOS, lymphocyte function-associated antigen-1 (LFA-1, CD11a/CD18), CD2, CD7, CD258 (LIGHT), NKG2C, B7-H3, and a ligand that specifically binds with CD83, and the like. Further examples of such costimulatory molecules include CD5, ICAM-1, GITR, BAFFR, HVEM (LIGHTR), SLAMF7, NKp80 (KLRF1), NKp44, NKp30, NKp46, CD160, CD19, CD4, CD8alpha, CD8beta, IL2R beta, IL2R gamma, IL7R alpha, ITGA4, VLA1, CD49a, ITGA4, IA4, CD49D, ITGA6, VLA-6, CD49f, ITGAD, CD11d, ITGAE, CD103, ITGAL, CD11a, LFA-1, ITGAM, CD11 b, ITGAX, CD11c, ITGB1, CD29, ITGB2, CD18, LFA-1, ITGB7, NKG2D, NKG2C, TNFR2, TRANCE/RANKL, DNAM1 (CD226), SLAMF4 (CD244, 2B4), CD84, CD96 (Tactile), CEACAM1, CRTAM, Ly9 (CD229), CD160 (BY55), PSGL1, CD100 (SEMA4D), CD69, SLAMF6 (NTB-A, Ly108), SLAM (SLAMF1, CD150, IPO-3), BLAME (SLAMF8), SELPLG (CD162), LTBR, LAT, GADS, SLP-76, PAG/Cbp, and a ligand that specifically binds with CD83. In some embodiments, the costimulatory signaling domain of the CAR is a functional signaling domain of a costimulatory molecule described herein, e.g., OX40, CD27, CD28, CD30, CD40, PD-1, CD2, CD7, CD258, NKG2C, B7-H3, a ligand that binds to CD83, ICAM-1, LFA-1 (CD11a/CD18), ICOS and 4-1BB (CD137), or any combination thereof.

[0444] As used herein, the term “signaling domain” refers to the functional portion of a protein which acts by transmitting information within the cell to regulate cellular activity via defined signaling pathways by generating second messengers or functioning as effectors by responding to such messengers.

[0445] The cytoplasmic signaling sequences within the cytoplasmic signaling portion of the CAR may be linked to each other in a random or specified order. Optionally, a short oligo- or polypeptide linker, for example, between 2 and 10 amino acids in length may form the linkage.
[0446] (iv) Antibody Therapy

[0447] In certain embodiments, the heterodimeric Fc-fused protein therapy is combined with an antibody therapy to treat subjects known or suspected of having cancer.

[0448] In certain embodiments, the heterodimeric Fc-fused protein is combined with a therapy comprising an anti-HER2 binding domain, such as an anti-HER2 antibody or anti-HER2 antibody platforms (e.g., a bi-specific or tri-specific antibody comprising an anti-HER2 binding domain, anti-HER2 antibody-drug conjugates, or anti-HER2 CAR). Anti-HER2 antibodies include, but are not limited to, trastuzumab (HERCEPTIN®—Roche/Genentech; Kanjinti-Amgen), pertuzumab (PERJETA®—Roche/Genentech), and MGAH22 (described in detail in U.S. Pat. No. 8,802,093, herein incorporated by reference for all purposes). Anti-HER2 antibody platforms include, but are not limited to, ertumaxomab (REXOMUN®—Creative Biolabs) and trastuzumab emtansine (ado-trastuzumab emtansine/T-DM1; KADCYLA®—Roche/Genentech). In certain embodiments, the anti-HER2 binding domain therapy is used in combination with the heterodimeric Fc-fused protein therapy to treat subjects known or suspected of having cancer. In certain embodiments, the anti-HER2 binding domain therapy is administered by IV infusion. In certain embodiments, the anti-HER2 binding domain therapy is administered at a dose of 1 mg/kg/day, 2 mg/kg/day, 3 mg/kg/day, 4 mg/kg/day, 5 mg/kg/day, 6 mg/kg/day, 7 mg/kg/day, 8 mg/kg/day, 9 mg/kg/day, 10 mg/kg/day. In certain embodiments, the anti-HER2 binding domain therapy is administered at a dose of at least 1 mg/kg/day, at least 2 mg/kg/day, at least 3 mg/kg/day, at least 4 mg/kg/day, at least 5 mg/kg/day, at least 6 mg/kg/day, at least 7 mg/kg/day, at least 8 mg/kg/day, at least 9 mg/kg/day, at least 10 mg/kg/day. In certain embodiments, the anti-HER2 binding domain therapy is administered at a dose of less than 1 mg/kg/day.

[0449] In certain embodiments, the anti-HER2 binding domain therapy is used in combination with the heterodimeric Fc-fused protein therapy to treat subjects known or suspected of having breast cancer, e.g., a subject diagnosed with metastatic HER2-overexpressing breast cancer. In certain embodiments, the anti-HER2 binding domain therapy is administered at 4 mg/kg/day. In certain embodiments, the anti-HER2 binding domain therapy is administered at 4 mg/kg/day by IV infusion over 90 minutes. In certain embodiments, the anti-HER2 binding domain therapy is administered at 2 mg/kg/day. In certain embodiments, the anti-HER2 binding domain therapy is administered at 2 mg/kg/day by IV infusion over 30 minutes. In certain embodiments, the anti-HER2 binding domain therapy is administered at an initial dose of 4 mg/kg/day, then subsequently administered weekly at 2 mg/kg/day. In certain embodiments, the anti-HER2 binding domain therapy is administered at an initial dose of 4 mg/kg/day, then subsequently administered weekly at 2 mg/kg/day for 52 weeks.

[0450] In certain embodiments, the anti-HER2 binding domain therapy is used in combination with the heterodimeric Fc-fused protein therapy to treat subjects known or suspected of having gastric cancer, e.g., a subject diagnosed with metastatic HER2-overexpressing gastric cancer. In certain embodiments, the anti-HER2 binding domain therapy is administered at 8 mg/kg/day. In certain embodiments, the anti-HER2 binding domain therapy is administered at 8 mg/kg/day by IV infusion over 90 minutes. In certain embodiments, the anti-HER2 binding domain therapy is administered at 6 mg/kg/day. In certain embodiments, the anti-HER2 binding domain therapy is administered at 6 mg/kg/day by IV infusion over 30-90 minutes. In certain embodiments, the anti-HER2 binding domain therapy is administered at an initial dose of 8 mg/kg/day, then subsequently administered weekly at 6 mg/kg/day. In certain embodiments, the anti-HER2 binding domain therapy is administered at an initial dose of 8 mg/kg/day, then subsequently administered weekly at 6 mg/kg/day for 52 weeks.

[0451] In certain embodiments, the heterodimeric Fc-fused protein therapy is combined with a therapy comprising an anti-CD20 binding domain, such as an anti-CD20 antibody or anti-CD20 antibody platforms (e.g., a bi-specific or tri-specific antibody comprising an anti-CD20 binding domain, anti-CD20 antibody-drug conjugates, or anti-CD20 CAR). Anti-CD20 antibodies include, but are not limited to, rituximab (RITUXAN®-Roche/Genentech), ocrelizumab (OCREVUS®-Roche/Genentech), obinutuzumab (GAZYVA®-Roche/Genentech), ofatumumab (ARZERRA® Novartis), and veltuzumab. In certain embodiments, the anti-CD20 binding domain therapy is used in combination with the heterodimeric Fc-fused protein therapy to treat subjects known or suspected of having cancer. In certain embodiments, the anti-CD20 binding domain therapy is administered by IV infusion. In certain embodiments, the anti-CD20 binding domain therapy is administered at a dose of 100 mg/m², 200 mg/m², 300 mg/m², 400 mg/m², 500 mg/m², 600 mg/m², 700 mg/m², 800 mg/m², 900 mg/m², or 1000 mg/m². In certain embodiments, the anti-CD20 binding domain therapy is administered at a dose of 375 mg/m². In certain embodiments, the anti-CD20 binding domain therapy is administered at a dose of at least 100 mg/m², at least 200 mg/m², at least 300 mg/m², at least 400 mg/m², at least 500 mg/m², at least 600 mg/m², at least 700 mg/m², at least 800 mg/m², at least 900 mg/m², or at least 1000 mg/m². In certain embodiments, the anti-CD20 binding domain therapy is administered at a dose of less than 400 mg/m². In certain embodiments, the anti-CD20 binding domain therapy is administered at a dose of less than 375 mg/m2.

[0452] In certain embodiments, the anti-CD20 binding domain therapy is used in combination with the heterodimeric Fc-fused protein therapy to treat subjects known or suspected of having Non-Hodgkin's Lymphoma (NHIL). In certain embodiments, the anti-CD20 binding domain therapy is administered at a dose of 375 mg/m² by IV-infusion. In certain embodiments, the anti-CD20 binding domain therapy is administered at a dose less than 375 mg/m² by IV-infusion.

[0453] In certain embodiments, the anti-CD20 binding domain therapy is used in combination with the heterodimeric Fc-fused protein therapy to treat subjects known or suspected of having Chronic Lymphocytic Leukemia (CLL). In certain embodiments, the anti-CD20 binding domain therapy is administered at a dose of 375 mg/m² by IV-infusion in a first cycle, and at a dose of 500 mg/m² by IV-infusion per cycle in an additional 2-6 cycles. In certain embodiments, the anti-CD20 binding domain therapy is administered at a dose less than 375 mg/m² by IV-infusion. The combined anti-CD20 binding domain and heterodimeric Fc-fused protein therapy can be used in combination with fludarabine and cyclophosphamide (FC).

[0454] In certain embodiments, the anti-CD20 binding domain therapy is used in combination with the heterodimeric Fc-fused protein therapy to treat subjects known or suspected of having Rheumatoid Arthritis (RA). In certain embodiments, the anti-CD20 binding domain therapy is administered as two doses of 1000 mg, doses separated 2 weeks, by IV-infusion. In certain embodiments, the anti-CD20 binding domain therapy is administered as two doses of 1000 mg, doses separated 2 weeks, by IV-infusion up to 24 weeks. In certain embodiments, the combined anti-CD20 binding domain and heterodimeric Fc-fused protein therapy is coadministered with methotrexate.

[0455] In certain embodiments, the heterodimeric Fc-fused protein therapy is combined with a therapy comprising an antibody therapy comprising an agonist antibody. In certain embodiments, the agonist antibody is an anti-4-1BB antibody, an anti-CD137 antibody, an anti-FAP antibody, an anti-OX40 antibody, an anti-CD40 antibody, an anti-GITR antibody, or an anti-CD27 antibody. In certain embodiments, the agonist antibody is a bispecific antibody. In certain embodiments, the agonist antibody is a multispecific antibody, e.g., a bispecific antibody, comprising two or more antigen binding domains selected from an anti-4-1BB antibody, an anti-CD137 antibody, an anti-FAP antibody, an anti-OX40 antibody, an anti-CD40 antibody, an anti-GITR antibody, or an anti-CD27 antibody. An illustrative example is a bispecific agonist antibody targeting 4-1BB and CD137, such as utomilumab (Pfizer).
[0456] (v) Checkpoint Inhibitor Therapy

[0457] In certain embodiments, the heterodimeric Fc-fused protein therapy can be combined with a checkpoint inhibitor therapy. Illustrative immune checkpoint molecules that can be targeted for blocking or inhibition include, but are not limited to, CTLA-4, 4-1BB (CD137), 4-1BBL (CD137L), PDL1, PDL2, PD1, B7-H3, B7-H4, BTLA, HVEM, TIM3, GAL9, LAG3, TIM3, B7H3, B7H4, VISTA, KIR, 2B4 (belongs to the CD2 family of molecules and is expressed on all NK, γδ, and memory CD8+ (αβ) T cells), CD160 (also referred to as BY55), and CGEN-15049. Immune checkpoint inhibitors include antibodies, or antigen binding fragments thereof, or other binding proteins, that bind to and block or inhibit the activity of one or more of CTLA-4, PDL1, PDL2, PD1, B7-H3, B7-H4, BTLA, HVEM, TIM3, GAL9, LAG3, TIM3, B7H3, B7H4, VISTA, KIR, 2B4, CD160, and CGEN-15049. Illustrative immune checkpoint inhibitors include nivolumamb (anti-PD-1; OPDIVO®-BMS), AMP224 (anti-PD-1; NCI), pembrolizumab (anti-PD-1; MK-3475/KEYTRUDA®-Merck), pidilizumab (anti-PD-1 antibody; CT-011-Teva/CureTech), atezolizumab (anti-PD-L1; TECENTRIQ®-Roche/Genentech), durvalumab (anti-PD-L1; MEDI4736/IMFINZI®-Medimmune/AstraZeneca), avelumab (anti-PD-L1; BAVENCIO®-Pfizer), BMS-936559 (anti-PD-L1-BMS), ipilimumab (anti-CTLA-4; YERVOY®-BMS), tremelimumab (anti-CTLA-4; Medimmune/AstraZeneca), lirilumab (anti-KIR; BMS), monalizumab (anti-NKG2A; Innate Pharma/AstraZeneca), BY55 (anti-CD160), anti-OX40. anti-TIM3, and anti-LAG3.

[0458] In certain embodiments, the method of the present invention further comprises administering to the subject an anti-PD-1 antibody. Many anti-PD-1 antibodies have been developed for therapeutic purposes and are described in, for example, Gong et al., (2018) J. ImmunoTher Cancer (2018) 6:8. In certain embodiments, the anti-PD-1 antibody is pembrolizumab. In certain embodiments pembrolizumab can be administered via various routes, e.g., intravenously, subcutaneously, intramuscularly, or intraperitoneally. In certain embodiments, pembrolizumab is administered intravenously. In certain embodiments, pembrolizumab can be administered at a dose of about 100 mg, about 125 mg, about 150 mg, about 175 mg, about 200 mg, about 225 mg, about 250 mg, about 275 mg, about 300 mg, or about 400 mg. In certain embodiments, pembrolizumab is administered at a dose of about 200 mg every 3 weeks. In certain embodiments, pembrolizumab is administered at a dose of about 400 mg every 6 weeks. In certain embodiments about 200 mg of pembrolizumab is administered on Day 1 of the initial treatment cycle. In certain embodiments, if the subject receives one or more subsequent treatment cycles, 200 mg of pembrolizumab is administered once every three weeks in the subsequent treatment cycles, starting from Day 1 of the first subsequent treatment cycle. In some embodiments, administration of pembrolizumab can precede each administration of the pharmaceutical formulation, can be concurrent with each administration of the pharmaceutical formulation, or follow each administration of the pharmaceutical formulation. In certain embodiments, administration of pembrolizumab precedes each administration of the pharmaceutical formulation. In some embodiments, the pharmaceutical formulation can be administered within about 10 minutes, about 20 minutes, about 30 minutes, about 40 minutes, about 50 minutes, about 1 hour, about 1.5 hours, about 2 hours, about 2.5 hours, about 3 hours, about 3.5 hours, about 4 hours, about 4.5 hours, or about 5 hours after completion of administration of pembrolizumab. In certain embodiments, the pharmaceutical formulation is administered within 1 hour after completion of administration of pembrolizumab.

[0459] In some embodiments, the pharmaceutical formulation administered in combination with pembrolizumab is for the treatment of a cancer selected from the group consisting of: melanoma, non-small cell lung cancer (NSCLC), small cell lung cancer (SCLC), head and neck squamous cell carcinoma (HNSCC), classical Hodgkin lymphoma, primary mediastinal large B-cell lymphoma, urothelial carcinoma, microsatellite instability-high cancer, gastric cancer, oesophageal cancer, cervical cancer, hepatocellular carcinoma, Merkel cell carcinoma, renal cell carcinoma, and endometrial carcinoma.

[0460] In certain embodiments, the anti-PD-1 antibody is nivolumab. In certain embodiments nivolumab can be administered via various routes, e.g., intravenously, subcutaneously, intramuscularly, or intraperitoneally. In certain embodiments, nivolumab is administered intravenously. In some embodiments, nivolmab can be administered at a dose of about 200 mg, about 220 mg, about 240 mg, about 260 mg about 280 mg, about 300 mg, about 320 mg, about 340 mg, about 360 mg, about 380 mg, about 400 mg, about 420 mg, about 440 mg, about 460 mg, about 480 mg, about 500 mg, about 520 mg, about 540 mg, about 560 mg, about 580 mg, or about 600 mg. In certain embodiments, nivolumab is administered at a dose of about 240 mg. In certain embodiments, nivolumab is administered at a dose of about 240 mg once about every two weeks. In certain embodiments, nivolumab is administered at a dose of about 360 mg. In certain embodiments, nivolumab is administered at a dose of about 360 mg once about every three weeks. In certain embodiments, nivolumab is administered at a dose of about 480 mg. In certain embodiments, nivolumab is administered at a dose of about 480 mg once about every four weeks. In some embodiments, administration of nivolumab can precede each administration of the pharmaceutical formulation, can be concurrent with each administration of the pharmaceutical formulation, or follow each administration of the pharmaceutical formulation. In certain embodiments, administration of nivolumab precedes each administration of the pharmaceutical formulation. In some embodiments, the pharmaceutical formulation can be administered within about 10 minutes, about 20 minutes, about 30 minutes, about 40 minutes, about 50 minutes, about 1 hour, about 1.5 hours, about 2 hours, about 2.5 hours, about 3 hours, about 3.5 hours, about 4 hours, about 4.5 hours, or about 5 hours after completion of administration of nivolumab. In certain embodiments, the pharmaceutical formulation is administered within 1 hour after completion of administration of nivolumab. In some embodiments, the pharmaceutical formulation administered in combination with nivolumab is for the treatment of a cancer selected from the group consisting of: melanoma, non-small cell lung cancer (NSCLC), small cell lung cancer (SCLC), renal cell carcinoma, classical Hodgkin lymphoma, head and neck squamous cell carcinoma (HNSCC), colorectal cancer, hepatocellular carcinoma, bladder cancer, and oesophageal cancer. In certain embodiments the cancer is melanoma. In certain embodiments the melanoma is unresectable or metastatic. In some embodiments the cancer is colorectal cancer. In certain embodiments, the colorectal cancer is microsatellite instability-high (MSI-H) or mismatch repair deficient (dMMR) metastatic colorectal cancer.

[0461] In certain embodiments, the checkpoint inhibitor therapy is used in combination with the heterodimeric Fc-fused protein therapy to treat subjects known or suspected of having cancer. In certain embodiments, the checkpoint inhibitor therapy is administered by IV infusion. In certain embodiments, the checkpoint inhibitor therapy is administered by IV infusion over 30 minutes. In certain embodiments, the checkpoint inhibitor therapy is administered every 3 weeks. In certain embodiments, the checkpoint inhibitor therapy is administered at a dose of about 100 mg, about 200 mg, about 300 mg, about 400 mg, about 500 mg, about 600 mg, about 700 mg, about 800 mg, about 900 mg, or about 1000 mg. In certain embodiments, the checkpoint inhibitor therapy is administered at a dose of 200 mg. In certain embodiments, the checkpoint inhibitor therapy is administered at a dose of at least 100 mg, at least 200 mg, at least 300 mg, at least 400 mg, at least 500 mg, at least 600 mg, at least 700 mg, at least 800 mg, at least 900 mg, or at least 1000 mg. In certain embodiments, the checkpoint inhibitor therapy is administered at a dose of less than 200 mg. In certain embodiments, the checkpoint inhibitor therapy is used in combination with the heterodimeric Fc-fused protein therapy to treat subjects known or suspected of having melanoma, non-small cell lung cancer (NSCLC), head and neck squamous cell carcinoma (HNSCC), classical Hodgkin lymphoma, primary mediastinal large B-Cell lymphoma, bladder cancer, urothelial carcinoma, microsatellite instability-high cancer, colorectal cancer, gastric cancer, oesophageal cancer, cervical cancer, hepatocellular carcinoma, Merkel cell carcinoma, renal cell carcinoma (RCC), endometrial carcinoma, cutaneous T cell lymphoma, and triple negative breast cancer.
[0462] (vi) Additional Cytokine Therapy

[0463] In some embodiments, the heterodimeric Fc-fused protein therapy is combined with one or more additional cytokine therapies, one or more chemokine therapies, or combinations thereof. In some embodiments, the heterodimeric Fc-fused protein therapy is combined with one or more additional cytokine therapies. In some embodiments, the heterodimeric Fc-fused protein therapy is combined with one or more chemokine therapies. In some embodiments, the cytokine therapy comprises a pro-inflammatory cytokine, a Th1 cytokine, or a Th2 cytokine. In some embodiments, the cytokine therapy comprises a recombinant human cytokine or chemokine.

[0464] In some embodiments, the cytokine therapy includes a cytokine that is an interleukin (e.g., IL-1, IL-2, IL-6, IL-7, IL-8, IL-12, IL-13, IL-15, IL-16, IL-18, IL-21 and IL-22). In some embodiments, the cytokine therapy includes a cytokine that is growth factor (e.g., tumor necrosis factor (TNF), LT, EMAP-II, GM-CSF, FGF and PDGF). In some embodiments, the cytokine therapy comprises an anti-inflammatory cytokine (e.g., IL-4, IL-10, IL-11, IL-13 and TGF).

[0465] In some embodiments, the chemokine therapy includes a pro-inflammatory chemokine (e.g., GRO-α, GRO-b, LIX, GCP-2, MIG, IP10, I-TAC, and MCP-1, RANTES, Eotaxin, SDF-1, and MIP3a). In some embodiments, the chemokine therapy includes a chemokine receptor. In some embodiments, the chemokine therapy includes a CXC chemokine receptor (e.g., CXCR1, CXCR2, CXCR3, CXCR4, CXCR5, CXCR6, and CXCR7), a CC chemokine receptor (e.g., CCR1, CCR2, CCR3, CCR4, CCR5, CCR6, CCR7, CCR8, CCR9, CCR10, and CCR11), a CX3C chemokine receptor (e.g., CX3C11), or a XC chemokine receptor (e.g., XCR1). In some embodiments, the chemokine therapy comprises a G protein-linked transmembrane receptor.

[0466] In some embodiments, the cytokine therapy comprises a cytokine therapy that synergizes with the IL-12 signaling. In some embodiments, the cytokine therapy comprises an IL-2 cytokine or a derivative thereof. In some embodiments, the IL-2 therapy is aldesleukin (Proleukin-Prometheus Therapeutics). In some embodiments, the IL-2 therapy and/or aldesleukin is administered intravenously. In some embodiments, the cytokine therapy comprises an IL-15 cytokine or a derivative thereof. In some embodiments, the IL-15 therapy is ALT-803 (Altor Bioscience) or NKTR-255 (Nektar). In some embodiments, the IL-15 therapy, NKTR-255, and/or ALT-803 is administered subcutaneously. In some embodiments, the chemokine therapy comprises a CXCL9 chemokine, a CXCL10 chemokine, or derivatives thereof.

[0467] In some embodiments, the cytokine or chemokine therapy includes administering a cytokine or chemokine to a subject. In some embodiments, the cytokine or chemokine therapy includes administering a recombinant cytokine or chemokine to a subject. In some embodiments, the cytokine or chemokine therapy includes engineering a cell to produce the cytokine or chemokine. In some embodiments, the cytokine or chemokine therapy includes engineering a cell ex vivo, in vitro, or in vivo to produce the cytokine or chemokine.

[0468] In some embodiments, the cytokine or chemokine therapy includes engineering a cell to produce the cytokine or chemokine using a viral vector-based delivery platform such as vaccinia, fowlpox, self-replicating alphavirus, marabavirus, adenovirus (See, e.g., Tatsis et al., Adenoviruses, Molecular Therapy (2004) 10, 616-629), a lentivirus, including but not limited to second, third or hybrid second/third generation lentivirus and recombinant lentivirus of any generation designed to target specific cell types or receptors (See, e.g., Hu et al., Immunization Delivered by Lentiviral Vectors for Cancer and Infectious Diseases, Immunol Rev. (2011) 239(1): 45-61, Sakuma et al., Lentiviral vectors: basic to translational, Biochem J. (2012) 443(3):603-18, Cooper et al., Rescue of splicing-mediated intron loss maximizes expression in lentiviral vectors containing the human ubiquitin C promoter, Nucl. Acids Res. (2015) 43 (1): 682-690, Zufferey et al., Self-Inactivating Lentivirus Vector for Safe and Efficient In vivo Gene Delivery, J. Virol. (1998) 72 (12): 9873-9880), or an adeno-associated virus (“AAV”) vector, as described in more detail in U.S. Pat. No. 5,173,414; Tratschin et al, Mol. Cell. Biol. 5:3251-3260 (1985); Tratschin, et al, Mol. Cell, Biol. 4:2072-2081 (1984); Hermonat et al., PNAS 81:64666470 (1984); and Samulski et al, J. Virol. 63:03822-3828 (1989)). In some embodiments, the cytokine or chemokine therapy includes engineering a cell to produce the cytokine or chemokine using a LNP, liposome, or an exosome. In some embodiments, the cytokine or chemokine therapy includes engineering a cell to produce the cytokine or chemokine using genome editing, such as using a nuclease-based genome editing systems (e.g., a Clustered Regularly Interspaced Short Palindromic Repeats (CRISPR) family, a Transcription activator-like effector nuclease (TALEN), a zinc-finger nuclease (ZFN), and a homing endonuclease (HE) based genome editing system or a derivative thereof). In some embodiments, the cytokine or chemokine therapy includes engineering a cell to produce the cytokine or chemokine using electroporation.
[0469] (vii) Innate Immune System Agonist Therapy

[0470] In some embodiments, the heterodimeric Fc-fused protein therapy is combined with one or more innate immune system agonists.

[0471] In some embodiments, the innate immune system agonist comprises a toll-like receptor (TLR) agonist. In some embodiments, the TLR agonist comprises a TLR1/2, TLR2/6, TLR3, TLR4, TLR7, TLR8, TLR7/8, or TLR9 agonist. In some embodiments, a TLR2/6 agonist comprises lipoproteins, such as bacterial lipoproteins or derivatives, such as Pam2CSK4. In some embodiments, a TLR1/2 agonist comprises lipoproteins. In some embodiments, a TLR3 agonist comprises a dsRNA analog, such as rintatolimod (AMPLIGEN®-Hemispherx Biopharma) or poly IC-LC (e.g., HILTONOL®). In some embodiments, a TLR4 agonist comprises lipopolysaccharide (LPS, also referred to as endotoxin) or derivatives, such as lipid A. In some embodiments, a TLR7 agonist comprises a ssRNA or derivatives or imidazoquinoline derivatives including, but not limited to, resiquimod (also referred to as R848), imiquimod (ZYCLARA®, Aldara-Medicis), and gardiquimod. In some embodiments, a TLR7 agonist is also a TLR8 agonist, such as imiquimod or Medi-9197 (AstraZeneca/MedImmune). In some embodiments, a TLR9 agonist comprises a CpG-containing oligodeoxynucleotide (CpG-ODN) or SD-101 (Dynavax).

[0472] In some embodiments, the innate immune system agonist comprises a Stimulator of interferon genes (STING) agonist. In some embodiments, the STING agonist comprises a cyclic-di-nucleotide (CDN). Is some embodiments, the CDN comprises a cyclic-di-AMP, a cyclic-di-GMP, or a cyclic-GMP-AMP (cGAMP). In some embodiments, the STING agonist comprises a nucleic acid (e.g., DNA or RNA) that stimulates cGAS. In some embodiments, the STING agonist is ADU-S100 (also referred to as MIW815-Aduro/Novartis).
[0473] (viii) Chemotherapy

[0474] In certain embodiments, the heterodimeric Fc-fused protein therapy is combined with one or more chemotherapies. In certain embodiments, the heterodimeric Fc-fused protein therapy is combined with one or more chemotherapies to treat a subject diagnosed with cancer. Examples of chemotherapy agents include aldesleukin, alvocidib, antineoplaston AS2-1, antineoplaston A10, anti-thymocyte globulin, amifostine trihydrate, aminocamptothecin, arsenic trioxide, beta alethine, Bcl-2 family protein inhibitor ABT-263, ABT-199, BMS-345541, bortezomib (VELCADE®), bryostatin 1, busulfan, carboplatin, campath-1H, CC-5103, carmustine, caspofungin acetate, clofarabine, cisplatin, Cladribine (LEUSTARIN®), Chlorambucil (LEUKERAN®), Curcumin, cyclosporine, Cyclophosphamide (Cyloxan, Endoxan, Endoxana, Cyclostin), cytarabine, denileukin diftitox, dexamethasone, DT PACE, docetaxel, dolastatin 10, Doxorubicin (ADRIAMYCIN®, ADRIBLASTINE®), doxorubicin hydrochloride, enzastaurin, epoetin alfa, etoposide, Everolimus (RAD001), fenretinide, filgrastim, melphalan, mesna, Flavopiridol, Fludarabine (FLUDARA®), Geldanamycin (17-AAG), ifosfamide, irinotecan hydrochloride, ixabepilone, Lenalidomide (REVLIMID®, CC-5013), lymphokine-activated killer cells, melphalan, methotrexate, mitoxantrone hydrochloride, motexafin gadolinium, mycophenolate mofetil, nelarabine, oblimersen (GENASENSE®) Obatoclax (GX15-070), oblimersen, octreotide acetate, omega-3 fatty acids, oxaliplatin, paclitaxel, PD0332991, PEGylated liposomal doxorubicin hydrochloride, pegfilgrastim, Pentstatin (NIPENT®), perifosine, Prednisolone, Prednisone, R-roscovitine (SELICILIB®, CYC202), recombinant interferon alfa, recombinant interleukin-12, recombinant interleukin-11, recombinant flt3 ligand, recombinant human thrombopoietin, rituximab, sargramostim, sildenafil citrate, simvastatin, sirolimus, Styryl sulphones, tacrolimus, tanespimycin, Temsirolimus (CC1-779), Thalidomide, therapeutic allogeneic lymphocytes, thiotepa, tipifarnib, VELCADE® (BORTEZOMIB® or PS-341), Vincristine (ONCOVIN®), vincristine sulfate, vinorelbine ditartrate, Vorinostat (SAHA), and FR (fludarabine, rituximab), CHOP (cyclophosphamide, doxorubicin, vincristine, prednisone), CVP (cyclophosphamide, vincristine and prednisone), FCM (fludarabine, cyclophosphamide, mitoxantrone), FCR (fludarabine, cyclophosphamide, rituximab), hyperCVAD (hyperfractionated cyclophosphamide, vincristine, doxorubicin, dexamethasone, methotrexate, cytarabine), ICE (iphosphamide, carboplatin and etoposide), MCP (mitoxantrone, chlorambucil, and prednisolone), R-CHOP (rituximab plus CHOP), R-CVP (rituximab plus CVP), R-FCM (rituximab plus FCM), R-ICE (rituximab-ICE), and R-MCP (R-MCP).

[0475] In certain embodiments, the heterodimeric Fc-fused protein therapy is combined with one or more chemotherapies to treat a subject diagnosed with colon cancer, rectal cancer, or colorectal cancer (CRC). In certain embodiments, the chemotherapy comprises FOLFOX (5-FU, leucovorin, and oxaliplatin/Eloxatin), FOLFIRI (leucovorin, 5-FU, and irinotecan/Camptosar), FOLFOXIRI (leucovorin, 5-FU, oxaliplatin, and irinotecan), CapeOx (capecitabine and oxaliplatin), 5-FU coadministered with leucovorin, capecitabine (XELODA®) alone, or Trifluridine and tipiracil (LONSURF®). In certain embodiments, the chemotherapy comprises a VEGF targeting agent, such as bevacizumab (AVASTIN®), ziv-aflibercept (ZALTRAP®), ramucirumab (CYRAMZA®), or Regorafenib (STIVARGA®), or an EGFR targeting agent such as cetuximab (ERBITUX) or panitumumab (VECTIBIX®). In certain embodiments, the chemotherapy coadministers a chemotherapy selected from FOLFOX, FOLFIRI, FOLFOXIRI, CapeOx, 5-FU coadministered with leucovorin, capecitabine alone, and Trifluridine/tipiracil together with a VEGF targeting agent or an EGFR targeting agent.

[0476] In certain embodiments, the heterodimeric Fc-fused protein therapy is combined with one or more chemotherapies to treat a subject diagnosed with breast cancer. In certain embodiments, the chemotherapy comprises doxorubicin (ADRIAMYCIN®), pegylated liposomal doxorubicin, epirubicin (ELLENCE®), paclitaxel (Taxol), docetaxel (TAXOTERE®), albumin-bound paclitaxel (ABRAXANE®), 5-fluorouracil (5-FU), cyclophosphamide (CYTOXAN®), carboplatin (PARAPLATIN®), cisplatin, vinorelbine (NAVELBINE®), capecitabine (XELODA), gemcitabine (GEMZAR®), ixabepilone (IXEMPRA®), or eribulin (HALAVEN). In certain embodiments, the chemotherapy comprises a combination of two or more chemotherapies selected from doxorubicin (ADRIAMYCIN®), pegylated liposomal doxorubicin, epirubicin (ELLENCE®), paclitaxel (Taxol), docetaxel (TAXOTERE®), albumin-bound paclitaxel (ABRAXANE®), 5-fluorouracil (5-FU), cyclophosphamide (CYTOXAN®), carboplatin (PARAPLATIN®), cisplatin, vinorelbine (NAVELBINE®), capecitabine (XELODA®), gemcitabine (GEMZAR®), ixabepilone (IXEMPRA®), and eribulin (HALAVEN®).

[0477] In certain embodiments, the heterodimeric Fc-fused protein therapy is combined with one or more chemotherapies to treat a subject diagnosed with melanoma/skin-cancer. In certain embodiments, the chemotherapy comprises dacarbazine (also called DTIC), temozolomide, nab-paclitaxel, paclitaxel, cisplatin, carboplatin, or vinblastine.
[0478] (ix) Targeted Agent Therapy

[0479] In certain embodiments, the heterodimeric Fc-fused protein therapy is combined with one or more targeted agents. In general, targeted agents act on specific molecular targets, such as targets associated with cancer. Targeted agents are differentiated from standard chemotherapies in that standard chemotherapies act on all rapidly dividing normal and cancerous cells. Targeted agents include, but are not limited to, a hormone therapy, a signal transduction inhibitor, a gene expression modulator, an apoptosis inducer, an angiogenesis inhibitor, an immunotherapy, a toxin delivery molecule (e.g., an antibody drug-conjugate), and a kinase inhibitor. In certain embodiments, a targeted agent comprises a receptor agonist or ligand.

[0480] In certain embodiments, the heterodimeric Fc-fused protein therapy is combined with one or more targeted agents to treat a subject diagnosed with colon cancer, rectal cancer, or colorectal cancer (CRC). In certain embodiments, the targeted agent comprises cetuximab (ERBITUX®), panitumumab (VECTIBIX®), bevacizumab (AVASTIN®), ziv-aflibercept (ZALTRAP®), regorafenib (STIVARGA®), ramucirumab (CYRAMZA®), nivolumab (OPDIVO®), or ipilimumab (YERVOY®).

[0481] In certain embodiments, the heterodimeric Fc-fused protein therapy is combined with one or more targeted agents to treat a subject diagnosed with breast cancer. In certain embodiments, the targeted agent comprises everolimus (AFINITOR®), tamoxifen (NOLVADEX®), toremifene (FARESTON®), trastuzumab (HERCEPTIN®), fulvestrant (FASLODEX®), anastrozole (ARIMIDEX®), exemestane (AROMASIN®), lapatinib (TYKERB®), letrozole (FEMARA®), pertuzumab (PERJETA®), ado-trastuzumab emtansine (KADCYLA®), palbociclib (IBRANCE®), ribociclib (KISQALI®), neratinib maleate (NERLYNX™), abemaciclib (VERZENIO™), olaparib (LYNPARZA™), atezolizumab (TECENTRIQ®), or alpelisib (PIQRAY®).

[0482] In certain embodiments, the heterodimeric Fc-fused protein therapy is combined with one or more targeted agents to treat a subject diagnosed with melanoma/skin-cancer. In certain embodiments, the targeted agent comprises Vismodegib (ERIVEDGE®), sonidegib (ODOMZO®), ipilimumab (YERVOY®), vemurafenib (ZELBORAF®), trametinib (MEKINIST®), dabrafenib (TAFINLAR®), pembrolizumab (KEYTRUDA®), nivolumab (OPDIVO®), cobimetinib (COTELLIC™), alitretinoin (PANRETIN®), avelumab (BAVENCIO®), encorafenib (BRAFTOVI™), binimetinib (MEKTOVI®), or cemiplimab-rwlc (LIBTAYO®).

[0483] In certain embodiments, the heterodimeric Fc-fused protein therapy is combined with a receptor agonist or ligand therapy. In certain embodiments, the receptor agonist or ligand therapy comprises an agonist antibody. In certain embodiments, the receptor agonist or ligand therapy comprises a receptor ligand, such as 4-1BBL or CD40L.
[0484] (x) Radiotherapy

[0485] In some embodiments, the heterodimeric Fc-fused protein therapy is combined with radiotherapy. In certain embodiments, the heterodimeric Fc-fused protein therapy is combined with a radioisotope particle, such as indium In-111, yttrium Y-90, or iodine I-131. Examples of combination therapies include, but are not limited to, Iodine-131 tositumomab (BEXXAR®), Yttrium-90 ibritumomab tiuxetan (ZEVALIN®), and BEXXAR® with CHOP. In certain embodiments, the radiotherapy comprises external-beam radiation therapy (EBRT), internal radiation therapy (brachytherapy), endocavitary radiation therapy, interstitial brachytherapy, radioembolization, hypofractionated radiation therapy, intraoperative radiation therapy (IORT), 3D-conformal radiotherapy, stereotactic radiosurgery (SRS), or stereotactic body radiation therapy (SBRT).

[0486] In certain embodiments, the heterodimeric Fc-fused protein therapy is combined with one or more radiotherapies to treat a subject diagnosed with colon cancer, rectal cancer, or colorectal cancer (CRC). In certain embodiments, the radiotherapy comprises external-beam radiation therapy (EBRT), internal radiation therapy (brachytherapy), endocavitary radiation therapy, interstitial brachytherapy, or radioembolization.

[0487] In certain embodiments, the heterodimeric Fc-fused protein therapy is combined with one or more radiotherapies to treat a subject diagnosed with breast cancer. In certain embodiments, the radiotherapy comprises external-beam radiation therapy, hypofractionated radiation therapy, intraoperative radiation therapy (IORT), or 3D-conformal radiotherapy.

[0488] In certain embodiments, the heterodimeric Fc-fused protein therapy is combined with one or more radiotherapies to treat a subject diagnosed with melanoma/skin-cancer. In certain embodiments, the radiotherapy comprises stereotactic radiosurgery (SRS; e.g., using a Gamma Knife or linear accelerator) or stereotactic body radiation therapy (SBRT).
[0489] (xi) Vaccine and Oncolytic Viruses Therapy

[0490] In some embodiments, the heterodimeric Fc-fused protein therapy is combined with one or more immunogenic compositions, e.g., a vaccine composition or an oncolytic virus, capable of raising a specific immune response, e.g., a tumor-specific immune response.

[0491] In some embodiments, the heterodimeric Fc-fused protein therapy is combined with a vaccine composition. Vaccine compositions typically comprise a plurality of antigens and or neoantigens specific for the tumor to be targeted. Vaccine compositions can also be referred to as vaccines.

[0492] In some embodiments, a vaccine composition further comprises an adjuvant and/or a carrier. In some embodiments, a vaccine composition associates with a carrier such as a protein or an antigen-presenting cell such as a dendritic cell (DC) capable of presenting the peptide to a T-cell. In some embodiments, carriers are scaffold structures, for example a polypeptide or a polysaccharide, to which an antigen or neoantigen, is capable of being associated.

[0493] In general, adjuvants are any substance whose admixture into a vaccine composition increases or otherwise modifies the immune response to an antigen or neoantigen. Optionally, adjuvants are conjugated covalently or non-covalently. The ability of an adjuvant to increase an immune response to an antigen is typically manifested by a significant or substantial increase in an immune-mediated reaction, or reduction in disease symptoms. For example, an increase in humoral immunity is typically manifested by a significant increase in the titer of antibodies raised to the antigen, and an increase in T-cell activity is typically manifested in increased cell proliferation, or cellular cytotoxicity, or cytokine secretion. An adjuvant may also alter an immune response, for example, by changing a primarily humoral or Th response into a primarily cellular, or Th response. Suitable adjuvants include, but are not limited to 1018 ISS, alum, aluminum salts, Amplivax, AS15, BCG, CP-870,893, CpG7909, CyaA, dSLIM, GM-CSF, IC30, IC31, Imiquimod, ImuFact IMP321, IS Patch, ISS, ISCOMATRIX, JuvImmune, LipoVac, MF59, monophosphoryl lipid A, Montanide IMS 1312, Montanide ISA 206, Montanide ISA 50V, Montanide ISA-51, OK-432, OM-174, OM-197-MP-EC, ONTAK, PepTel vector system, PLG microparticles, resiquimod, SRL172, Virosomes and other Virus-like particles, YF-17D, VEGF trap, R848, beta-glucan, Pam3Cys, Aquila's QS21 stimulon (Aquila Biotech, Worcester, Mass., USA) which is derived from saponin, mycobacterial extracts and synthetic bacterial cell wall mimics, and other proprietary adjuvants such as Ribi's Detox. Quil or Superfos. Adjuvants such as incomplete Freund's or GM-CSF are useful. Several immunological adjuvants (e.g., MF59) specific for dendritic cells and their preparation have been described previously (Dupuis M, et al., Cell Immunol. 1998; 186(1):18-27; Allison A C; Dev Biol Stand. 1998; 92:3-11). Cytokines can also be used. Several cytokines have been directly linked to influencing dendritic cell migration to lymphoid tissues (e.g., TNF-alpha), accelerating the maturation of dendritic cells into efficient antigen-presenting cells for T-lymphocytes (e.g., GM-CSF, IL-1 and IL-4) (U.S. Pat. No. 5,849,589, specifically incorporated herein by reference in its entirety) and acting as immunoadjuvants (e.g., IL-12) (Gabrilovich D I, et al., J Immunother Emphasis Tumor Immunol. 1996 (6):414-418). In some embodiments, an adjuvant comprises a CpG immunostimulatory oligonucleotide. In some embodiments, an adjuvant comprises a TLR agonist.

[0494] Other examples of useful adjuvants include, but are not limited to, chemically modified CpGs (e.g. CpR, Idera), Poly(I:C)(e.g. polyi:CI2U), non-CpG bacterial DNA or RNA as well as immunoactive small molecules and antibodies such as cyclophosphamide, sunitinib, bevacizumab, celecoxib, NCX-4016, sildenafil, tadalafil, vardenafil, sorafinib, XL-999, CP-547632, pazopanib, ZD2171, AZD2171, ipilimumab, tremelimumab, and SC58175, which may act therapeutically and/or as an adjuvant. The amounts and concentrations of adjuvants and additives can readily be determined by the skilled artisan without undue experimentation. Additional adjuvants include colony-stimulating factors, such as Granulocyte Macrophage Colony Stimulating Factor (GM-CSF, sargramostim).

[0495] In some embodiments, a vaccine composition comprises more than one different adjuvant. In some embodiments, a vaccine composition comprises any adjuvant substance including any of the above or combinations thereof. It is also contemplated that a vaccine and an adjuvant can be administered together or separately in any appropriate sequence.

[0496] In some embodiments, a carrier (or excipient) is present independently of an adjuvant. In some embodiments, the function of a carrier is to increase the molecular weight, increase activity or immunogenicity, to confer stability, to increase the biological activity, or to increase serum half-life. In some embodiments, a carrier aids presenting peptides to T-cells. In some embodiments, a carrier comprises any suitable carrier known to the person skilled in the art, for example a protein or an antigen presenting cell. Examples of carrier proteins include, but are not limited to, keyhole limpet hemocyanin, serum proteins such as transferrin, bovine serum albumin, human serum albumin, thyroglobulin or ovalbumin, immunoglobulins, or hormones, such as insulin or palmitic acid. For immunization of humans, the carrier is generally a physiologically acceptable carrier acceptable to humans and safe. However, tetanus toxoid and/or diptheria toxoid are suitable carriers. Alternatively, the carrier can be a dextran, for example Sepharose.

[0497] In some embodiments, a vaccine comprises a viral vector-based vaccine platform, such as vaccinia, fowlpox, self-replicating alphavirus, maraba virus, adenovirus (See, e.g., Tatsis et al., Adenoviruses, Molecular Therapy (2004) 10, 616-629), or lentivirus, including but not limited to second, third or hybrid second/third generation lentivirus and recombinant lentivirus of any generation designed to target specific cell types or receptors (See, e.g., Hu et al., Immunization Delivered by Lentiviral Vectors for Cancer and Infectious Diseases, Immunol Rev. (2011) 239(1): 45-61, Sakuma et al., Lentiviral vectors: basic to translational, Biochem J. (2012) 443(3):603-18, Cooper et al., Rescue of splicing-mediated intron loss maximizes expression in lentiviral vectors containing the human ubiquitin C promoter, Nucl. Acids Res. (2015) 43 (1): 682-690, Zufferey et al., Self-Inactivating Lentivirus Vector for Safe and Efficient In vivo Gene Delivery, J. Virol. (1998) 72 (12): 9873-9880). In general, upon introduction into a host, infected cells express the antigen or neoantigen and thereby elicits a host immune (e.g., CTL) response against the peptide(s).

[0498] Dependent on the packaging capacity of the above mentioned viral vector-based vaccine platforms, in some embodiments, the vaccine composition comprises one or more viral-vectors. In some embodiments, viral-vectors comprise sequences flanked by non-mutated sequences, separated by linkers, or preceded with one or more sequences targeting a subcellular compartment (See, e.g., Gros et al., Prospective identification of neoantigen-specific lymphocytes in the peripheral blood of melanoma patients, Nat Med. (2016) 22 (4):433-8, Stronen et al., Targeting of cancer neoantigens with donor-derived T cell receptor repertoires, Science. (2016) 352 (6291):1337-41, Lu et al., Efficient identification of mutated cancer antigens recognized by T cells associated with durable tumor regressions, Clin Cancer Res. (2014) 20(13):3401-10). Vaccinia vectors and methods useful in immunization protocols are described in, e.g., U.S. Pat. No. 4,722,848. Another vector is BCG (Bacille Calmette Guerin). BCG vectors are described in Stover et al. (Nature 351:456-460 (1991)). A wide variety of other vaccine vectors useful for therapeutic administration or immunization of neoantigens, e.g., Salmonella typhi vectors, and the like will be apparent to those skilled in the art from the description herein.

[0499] In some embodiments, the heterodimeric Fc-fused protein therapy is combined with an oncolytic virus therapy. In general, an oncolytic virus is a virus engineered to infect and kill mainly cancer cells. In some embodiments, in addition to an oncolytic virus killing a cancer cell, the oncolytic virus induces an immune response to the cancer cell.

[0500] In certain embodiments, the heterodimeric Fc-fused protein therapy is combined with oncolytic virus therapy to treat a subject diagnosed with melanoma/skin-cancer. In certain embodiments, the oncolytic virus comprises talimogene laherparepvec (IMLYGIC®), also referred to as T-VEC. In some embodiments, a heterodimeric Fc-fused protein comprising subunits of IL-12 is used for treating cancer (e.g., an advanced malignancy) in combination with an oncolytic virus (for example, Talimogene Laherparepvec (IMLYGIC®) or T-VEC).
[0501] (xii) Surgical Interventions

[0502] In some embodiments, the heterodimeric Fc-fused protein therapy is combined with surgical interventions, where abnormal tissue (e.g., a tumor) is surgically removed. In some embodiments, the tumor is cut from the subject's body using scalpels or other sharp tools to cut the tumor and/or surrounding tissue. In some embodiments, lasers can be used to cut abnormal tissue (e.g., a tumor). In some embodiments, surgical interventions can include the use of hyperthermia treatment, which exposes abnormal tissue (e.g., a tumor) to kill the cells of the abnormal tissue or make them more sensitive to radiation and certain chemotherapy drugs. In some embodiments, surgical interventions can include the use of photodynamic therapy, where certain drugs are activated by light to kill cancer cells. The surgical intervention can involve open surgery or minimally invasive surgery. In some embodiments, the surgical intervention can be used to remove the entire tumor, to debulk a tumor, or to ease cancer symptoms.

[0503] In some embodiments, the surgical intervention can be performed in a subject prior to administering the heterodimeric Fc-fused protein therapy. In other embodiments, the surgical intervention can be performed in a subject concurrently with the heterodimeric Fc-fused protein therapy. In other embodiments, the surgical intervention can be performed in a subject after the heterodimeric Fc-fused protein therapy.
[0504] (xiii) Cryotherapy

[0505] In some embodiments, the heterodimeric Fc-fused protein therapy is combined with cryotherapy (also called cryoablation or cryosurgery). In some embodiments, the cryotherapy is administered to a patient by applying liquid nitrogen or argon gas to destroy abnormal tissue (e.g., a tumor). In some embodiments, for tumors inside a subject's body, cryotherapy can be administered using a cryoprobe, and imaging procedures such as ultrasound or MRI can be used to guide a cryoprobe and/or to monitor freezing of target tissue.

[0506] In some embodiments, the cryotherapy can be administered to the patient prior to the heterodimeric Fc-fused protein therapy. In other embodiments, the cryotherapy can be administered to the patient concurrently with the heterodimeric Fc-fused protein therapy. In other embodiments, the cryotherapy can be administered to the subject after the heterodimeric Fc-fused protein therapy.

[0507] In certain embodiments, the method of treatment disclosed herein results in a disease response or improved survival of the subject or patient. For example, in certain embodiments, the disease response is a complete response, a partial response, or a stable disease. In certain embodiments, the improved survival is improved progression-free survival (PFS) or overall survival. Improvement (e.g., in PFS) can be determined relative to a period prior to initiation of the treatment of the present disclosure. Methods of determining disease response (e.g., complete response, partial response, or stable disease) and patient survival (e.g., PFS, overall survival) for BTC (e.g., advanced BTC, metastatic BTC), or biliary tract tumor therapy, are routine in the art and are contemplated herein. In some embodiments, disease response is evaluated according to RECIST 1.1 after subjecting the treated patient to contrast-enhanced computed tomography (CT) or magnetic resonance imaging (MRI) of the affected area (e.g., chest/abdomen and pelvis covering the area from the superior extent of the thoracic inlet to the symphysis pubis).

[0508] In some embodiments, biomarkers of immune activation are measured in order to assess biological activity. In certain embodiments, cellular parameters are assessed, e.g. peripheral blood mononuclear cell (PBMCs) for immunophenotyping (IPT) by flow cytometry. In certain embodiments, soluble factors are assessed, e.g., cytokines and chemokines in serum samples. In certain embodiments, serum levels of c-reactive protein (CRP) are assessed to determine toxicity. In certain embodiments, if the CRP concentration in the subject's blood is higher than a threshold CRP concentration, then the subject is identified as being at risk for developing an adverse drug reaction. In certain embodiments, if the CRP concentration in the subject's blood is about the same or lower than the threshold C-reactive protein concentration, the subject is not identified as being at risk for developing an adverse drug reaction. In specific embodiments, if the CRP concentration in the subject's blood is higher than the threshold CRP concentration, the administration of the pharmaceutical formulation is paused; the heterodimeric Fc-fused protein is administered at a lower dose; or a remedial action is taken to reduce or alleviate the formulation's toxicity effects in the subject.

[0509] In certain embodiments, an ex vivo IL12 response assay is used to assess activity, wherein PBMCs are collected for ex vivo stimulation followed by analysis of IFN□ production. In certain embodiments, circulating tumor (ct) deoxyribonucleic acid (DNA) may be assessed. In certain embodiments, tissue derived biomarkers are evaluated on pre-treatment and post-treatment biopsies, e.g., to investigate a possible correlation between clinical efficacy and analyzed markers. In certain embodiments, levels of PD-L1 expression are determined, e.g., using a commercially available kit (e.g., Dako PD-L₁ IHC 22C₃ pharmDx). In certain embodiments, CD3 positivity as an assay for T cell infiltration is determined by immunohistochemistry (IHC). In certain embodiments, frequency and/or localization of tumor-infiltrating leukocytes (e.g., CD8 T-cells, CD4 T-cells, T_{reg}, NK cells, macrophages [M1/2 profile]) is determined by IHC or immunofluorescence microscopy (IF). In some embodiments, a gene expression profile is performed. In some embodiments, pharmacogenomics is performed.
[0510] (m) Kits

[0511] The formulation of DF hIL12-Fc si is prepared as a lyophilized formulation or a liquid formulation. For preparing the lyophilized formulation, freeze-dried DF hIL12-Fc si is sterilized and stored in single-use glass vials. Several such glass vials are then packaged in a kit for delivering a dose to a subject diagnosed with a cancer or a tumor.

[0512] In one aspect, the present disclosure provides a kit including one or more vessels collectively including a formulation of about 0.1 mg, about 0.2 mg, about 0.3 mg, about 0.4 mg, about 0.5 mg, about 0.6 mg, about 0.7 mg, about 0.8 mg, about 0.9 mg, about 1 mg, about 2 mg, about 3 mg, about 4 mg, about 5 mg, about 6 mg, about 7 mg, about 8 mg, about 9 mg, or about 10 mg of a heterodimeric Fc-fused protein. In certain embodiments, the present disclosure provides a kit including one or more vessels collectively including a formulation of about 1 mg of a heterodimeric Fc-fused protein. In certain embodiments, the present disclosure provides a kit including one or more vessels collectively including a formulation of about 1 mg of the heterodimeric Fc-fused protein comprising a first polypeptide comprising the amino acid sequence of SEQ ID NO:290 and a second polypeptide comprising the amino acid sequence of SEQ ID NO:291

[0513] In certain embodiments, the formulation is prepared and packaged as a liquid formulation and stored as about as about 0.5 mg/vial to about 1.5 mg/vial (e.g., about 0.5 mg/vial to about 1.5 mg/vial, about 0.6 mg/vial to about 1.4 mg/vial, about 0.7 mg/vial to about 1.3 mg/vial, about 0.8 mg/vial to about 1.2 mg/vial, about 0.5 mg/vial to about 1.1 mg/vial, about 0.5 mg/vial to about 1.4 mg/vial, about 0.5 mg/vial to about 1.3 mg/vial, about 0.5 mg/vial to about 1.2 mg/vial, about 0.5 mg/vial to about 1.1 mg/vial, about 0.5 mg/vial to about 1.1 mg/vial, about 0.6 mg/vial to about 1.5 mg/vial, about 0.6 mg/vial to about 1.4 mg/vial, about 0.6 mg/vial to about 1.3 mg/vial, about 0.6 mg/vial to about 1.2 mg/vial, about 0.6 mg/vial to about 1.1 mg/vial, about 0.7 mg/vial to about 1.5 mg/vial, about 0.7 mg/vial to about 1.4 mg/vial, about 0.7 mg/vial to about 1.3 mg/vial, about 0.7 mg/vial to about 1.2 mg/vial, about 0.7 mg/vial to about 1.1 mg/vial, about 0.8 mg/vial to about 1.5 mg/vial, about 0.8 mg/vial to about 1.4 mg/vial, about 0.8 mg/vial to about 1.3 mg/vial, about 0.8 mg/vial to about 1.2 mg/vial, about 0.8 mg/vial to about 1.1 mg/vial, about 0.9 mg/vial to about 1.5 mg/vial, about 0.9 mg/vial to about 1.4 mg/vial, about 0.9 mg/vial to about 1.3 mg/vial, about 0.9 mg/vial to about 1.2 mg/vial, about 0.9 mg/vial to about 1.1 mg/vial). In certain embodiments, the formulation is a liquid formulation and stored as about 1 mg/vial.

[0514] In certain embodiments, the formulation is prepared and packaged as a lyophilized formulation and stored as about 0.5 mg/vial to about 1.5 mg/vial (e.g., about 0.5 mg/vial to about 1.5 mg/vial, about 0.6 mg/vial to about 1.4 mg/vial, about 0.7 mg/vial to about 1.3 mg/vial, about 0.8 mg/vial to about 1.2 mg/vial, about 0.5 mg/vial to about 1.1 mg/vial, about 0.5 mg/vial to about 1.4 mg/vial, about 0.5 mg/vial to about 1.3 mg/vial, about 0.5 mg/vial to about 1.2 mg/vial, about 0.5 mg/vial to about 1.1 mg/vial, about 0.5 mg/vial to about 1.1 mg/vial, about 0.6 mg/vial to about 1.5 mg/vial, about 0.6 mg/vial to about 1.4 mg/vial, about 0.6 mg/vial to about 1.3 mg/vial, about 0.6 mg/vial to about 1.2 mg/vial, about 0.6 mg/vial to about 1.1 mg/vial, about 0.7 mg/vial to about 1.5 mg/vial, about 0.7 mg/vial to about 1.4 mg/vial, about 0.7 mg/vial to about 1.3 mg/vial, about 0.7 mg/vial to about 1.2 mg/vial, about 0.7 mg/vial to about 1.1 mg/vial, about 0.8 mg/vial to about 1.5 mg/vial, about 0.8 mg/vial to about 1.4 mg/vial, about 0.8 mg/vial to about 1.3 mg/vial, about 0.8 mg/vial to about 1.2 mg/vial, about 0.8 mg/vial to about 1.1 mg/vial, about 0.9 mg/vial to about 1.5 mg/vial, about 0.9 mg/vial to about 1.4 mg/vial, about 0.9 mg/vial to about 1.3 mg/vial, about 0.9 mg/vial to about 1.2 mg/vial, about 0.9 mg/vial to about 1.1 mg/vial). In certain embodiments, the formulation is a lyophilized formulation and stored as about 1 mg/vial.

[0515] In certain embodiments, the vessels collectively may include about 0.1 mg, about 0.2 mg, about 0.3 mg, about 0.4 mg, about 0.5 mg, about 0.6 mg, about 0.7 mg, about 0.8 mg, about 0.9 mg, about 1 mg, about 2 mg, about 3 mg, about 4 mg, about 5 mg, about 6 mg, about 7 mg, about 8 mg, about 9 mg, about 10 mg, about 12 mg, about 15 mg, about 20 mg, about 21 mg, about 24 mg, about 25 mg, about 27 mg, about 30 mg, about 35 mg, about 36 mg, about 40 mg, about 45 mg, about 50 mg, about 55 mg, about 60 mg, about 65 mg, about 70 mg, about 75 mg, about 80 mg, about 85 mg, about 90 mg, about 95 mg, or about 100 mg of the heterodimeric Fc-fused protein of the present disclosure (e.g., DF hIL12-Fc si). In certain embodiments, the vessels include about 1 mg of the heterodimeric Fc-fused protein of the present disclosure (e.g., DF hIL12-Fc si). In certain embodiments, the vessels include about 1 mg of the heterodimeric Fc-fused protein comprising a first polypeptide comprising the amino acid sequence of SEQ ID NO: 290 and a second polypeptide comprising the amino acid sequence of SEQ ID NO: 291

[0516] In certain embodiments, the formulation in the vessels may be a lyophilized formulation. In certain embodiments, the formulation in the vessels may be a liquid formulation.

[0517] In certain embodiments, the formulation may be packed in kits containing a suitable number of vials. The information on the medication may be included, which are in accordance with approved submission documents. The kit may be shipped in transport cool containers (2° C. to 8° C.) that are monitored with temperature control devices.

[0518] The formulation may be stored at 2° C. to 8° C. until use. The vials of the formulations may be sterile and nonpyrogenic, and may not contain bacteriostatic preservatives.

[0519] The description above describes multiple aspects and embodiments of the invention. The patent application specifically contemplates all combinations and permutations of the aspects and embodiments.

### EXAMPLES

[0520] The invention now being generally described, will be more readily understood by reference to the following examples, which are included merely for purposes of illustration of certain aspects and embodiments of the present invention and are not intended to limit the invention.

### Example 1—Method of Preparation

[0521] The proteins of the present invention are typically made using recombinant DNA technology. In one exemplary embodiment, a first nucleic acid sequence encoding the first polypeptide comprising a first subunit of a multisubunit protein (p40 subunit of human IL-12) fused to a first antibody Fc domain polypeptide was cloned into a first expression vector (pET-pSURE-Puro); a second nucleic acid sequence encoding a second polypeptide comprising a second, different subunit of a multisubunit protein (p35 subunit of human IL-12) fused to a second antibody Fc domain polypeptide was cloned into a second expression vector (pET-pSURE-Puro); and the first and the second expression vectors were stably transfected together into host cells (e.g., Chinese Hamster Ovary cells) to produce the heterodimeric Fc-fused proteins.

[0522] Exemplary amino acid sequence encoded by the first expression vector is shown in SEQ ID NO:292. The first expression vector encoded a first polypeptide comprising a p40 subunit of human IL-12 fused to a human IgG1 Fc sequence comprising a Y349C mutation. The first polypeptide also included K360E and K409W mutations that promote heterodimerization, and LALAPA (L234A, L235A, and P329A) mutations that reduce effector functions. In SEQ ID NO: 292, leader sequence is shown in italics, the p40 subunit sequence of human IL-12 is underlined, and the mutations are shown in bold.

(SEQ ID NO: 292)
MDMRVPAQLLGLLLLWLPGARCIWELKKDVYVVELDWYPDAPGEMVVLT
CDTPEEDGITWTLDQSSEVLGSGKTLTIQVKEFGDAGQYTCHKGGEVLSH
SLLLLHKKEDGIWSTDILKDQKEPKNKTFLRCEAKNYSGRFTCWWLTTIS
TDLTFSVKSSRGSSDPQGVTCGAATLSAERVRGDNKEYEYSVECQEDSAC
PAAEESLPIEVMVDAVHKLKYENYTSSFFIRDIIKPDPPKNLQLKPLKNS
RQVEVSWEYPDTWSTPHSYFSLTFCVQVQGKSKREKKDRVFTDKTSATVI
CRKNASISVRAQDRYYSSSWSEWASVPCSPKSSDKTHTCPPCPAPEAAGG
PSVFLFPPKPKDTLMISRTPEVTCVVVDVSHEDPEVKFNWYVDGVEVHNA
KTKPREEQYNSTYRVVSVLTVLHQDWLNGKEYKCKVSNKALAAPIEKTIS
KAKGQPREPQVCTLPPSRDELTENQVSLTCLVKGFYPSDIAVEWESNGQP
ENNYKTTPPVLDSDGSFFLYSWLTVDKSRWQQGNVFSCSVMHEALHNHY
TQKSLSLSPG

[0523] Exemplary amino acid sequence encoded from the second expression vector is shown in SEQ ID NO: 293. The second expression vector encoded a second polypeptide comprising a p35 subunit of human IL-12 fused to a human IgG1 Fc sequence comprising a S354C mutation. The second polypeptide also included Q347R, D399V, and F405T mutations that promote heterodimerization, and LALAPA (L234A, L235A, and P329A) mutations that reduce effector functions. In SEQ ID NO: 293, leader sequence is shown in italics, the p35 subunit sequence of human IL-12 is underlined, and mutations are shown in bold.

(SEQ ID NO: 293)
MDMRVPAQLLGLLLLWLPGARCRNLPVATPDPGMFPCLHHSQNLLRAVSN
MLQKARQTLEFYPCTSEEIDHEDITKDKTSTVEACLPLELTKNESCLNSR
ETSFITNGSCLASRKTSFMMALCLSSIYEDLKMYQVEFKTMNAKLLMDPK
4QIFLDQNMLAVIDELMQALNFNSETVPQKSSLEEPDFYKTKIKLCILLH
AFRIRAVTIDRVMSYLNASGGGGSGGGGSGGGGSEPKSSDKTHTCPPCPA
PEAAGGPSVFLFPPKPKDTLMISRTPEVTCVVVDVSHEDPEVKFNWYVDG
VEVHNAKTKPREEQYNSTYRVVSVLTVLHQDWLNGKEYKCKVSNKALAAP
IEKTISKAKGQPREPRVYTLPPCRDELTKNQVSLTCLVKGFYPSDIAVEW
ESNGQPENNYKTTPPVLVSDGSFTLYSKLTVDKSRWQQGNVFSCSVMHEA
LHNHYTQKSLSLSPG

[0524] To achieve the highest yield of the protein, different ratios of the first and second expression vectors are explored to determine the optimal ratio for transfection into the host cells. After transfection, single clones are isolated for cell bank generation using methods known in the art, such as limited dilution, ELISA, FACS, microscopy, or Clonepix.

[0525] Clones are cultured under conditions suitable for bio-reactor scale-up and maintained expression of the proteins. The proteins are isolated and purified using methods known in the art including centrifugation, depth filtration, cell lysis, homogenization, freeze-thawing, affinity purification, gel filtration, ion exchange chromatography, hydrophobic interaction exchange chromatography, and mixed-mode chromatography.

### Example 2—Tumor Suppression by IL-12 Fused with a Silent Fc Domain Polypeptide in a CT26 Tumor Model

[0526] This example describes relative abilities of two IL-12-Fc fusion constructs of recombinant murine IL-12 (rmIL-12) to control tumor progression in a mouse colon cancer model. The two IL-12-Fc fusion variants used in this example were mIL-12-Fc wildtype (DF-mIL-12-Fc wt), which includes wild-type murine IL-12 p40 and p35 subunits fused to the N-termini of wild-type murine IgG2a Fc domain polypeptides, and mIL-12-Fc silent (DF-mIL-12-Fc si), which includes wild-type murine IL-12 p40 and p35 subunits fused to the N-termini of murine IgG2a Fc domain polypeptides with mutations L234A, L235A, and P329G. The amino acid sequences of the proteins are shown below:

mIL-12-p40-mIgG2A-EW (first chain of DF-mIL-12-Fc
wt)
(SEQ ID NO: 286)
MWELEKDVYVVEVDWTPDAPGETVNLTCDTPEEDDITWTSDQRHGVIGS
GKTLTITVKEFLDAGQYTCHKGGETLSHSHLLLHKKENGIWSTEILKNFK
NKTFLKCEAPNYSGRFTCSWLVQRNMDLKFNIKSSSSSPDSRAVTCGMAS
LSAEKVTLDQRDYEKYSVSCQEDVTCPTAEETLPIELALEARQQNKYENY
STSFFIRDIIKPDPPKNLQMKPLKNSQVEVSWEYPDSWSTPHSYFSLKFF
VRIQRKKEKMKETEEGCNQKGAFLVEKTSTEVQCKGGNVCVQAQDRYYNS
SCSKWACVPCRVRSPRGPTIKPCPPCKCPAPNLLGGPSVFIFPPKIKDVL
MISLSPIVTCVVVDVSEDDPDVQISWFVNNVEVHTAQTQTHREDYNSTLR
VVSALPIQHQDWMSGKEFKCKVNNKDLPAPIERTISKPKGSVRAPQVYVL
PPPEEEMTEKQVTLTCMVTDFMPEDIYVEWTNNGKTELNYKNTEPVLDSD
GSYFMYSWLRVEKKNWVERNSYSCSVVHEGLHNHHTTKSFSRTPG
mIL-12-p35-mIgG2A-RVT (second chain of DF-mIL-12-
Fc wt)
(SEQ ID NO: 287)
RVIPVSGPARCLSQSRNLLKTTDDMVKTAREKLKHYSCTAEDIDHEDITR
DQTSTLKTCLPLELHKNESCLATRETSSTTRGSCLPPQKTSLMMTLCLGS
IYEDLKMYQTEFQAINAALQNHNHQQIILDKGMLVAIDELMQSLNHNGET
LRQKPPVGEADPYRVKMKLCILLHAFSTRVVTINRVMGYLSSAGGGGSG
GGGSGGGGSPRGPTIKPCPPCKCPAPNLLGGPSVFIFPPKIKDVLMISLS
PIVTCVVVDVSEDDPDVQISWFVNNVEVHTAQTQTHREDYNSTLRVVSAL
PIQHQDWMSGKEFKCKVNNKDLPAPIERTISKPKGSVRAPRVYVLPPPEE
EMTKKQVTLTCMVTDFMPEDIYVEWTNNGKTELNYKNTEPVLVSDGSYTM
YSKLRVEKKNWVERNSYSCSVVHEGLHNHHTTKSFSRTPG
mIL-12-p40-mIgG2A-EW-LALAPG (first chain of DF-
mIL-12-Fc si)
(SEQ ID NO: 288)
MWELEKDVYVVEVDWTPDAPGETVNLTCDTPEEDDITWTSDQRHGVIGS
GKTLTITVKEFLDAGQYTCHKGGETLSHSHLLLHKKENGIWSTEILKNFK
NKTFLKCEAPNYSGRFTCSWLVQRNMDLKFNIKSSSSSPDSRAVTCGMAS
LSAEKVTLDQRDYEKYSVSCQEDVTCPTAEETLPIELALEARQQNKYENY
STSFFIRDIIKPDPPKNLQMKPLKNSQVEVSWEYPDSWSTPHSYFSLKFF
VRIQRKKEKMKETEEGCNQKGAFLVEKTSTEVQCKGGNVCVQAQDRYYNS
SCSKWACVPCRVRSPRGPTIKPCPPCKCPAPNAAGGPSVFIFPPKIKDVL
MISLSPIVTCVVVDVSEDDPDVQISWFVNNVEVHTAQTQTHREDYNSTLR
VVSALPIQHQDWMSGKEFKCKVNNKDLGAPIERTISKPKGSVRAPQVYVL
PPPEEEMTEKQVTLTCMVTDFMPEDIYVEWTNNGKTELNYKNTEPVLDSD
GSYFMYSWLRVEKKNWVERNSYSCSVVHEGLHNHHTTKSFSRTPG
mIL-12-p35-mIgG2A-RVT-LALAPG (second chain of DF-
mIL-12-Fc si)
(SEQ ID NO: 289)
RVIPVSGPARCLSQSRNLLKTTDDMVKTAREKLKHYSCTAEDIDHEDITR
DQTSTLKTCLPLELHKNESCLATRETSSTTRGSCLPPQKTSLMMTLCLGS
IYEDLKMYQTEFQAINAALQNHNHQQIILDKGMLVAIDELMQSLNHNGET
LRQKPPVGEADPYRVKMKLCILLHAFSTRVVTINRVMGYLSSAGGGGSG
GGGSGGGGSPRGPTIKPCPPCKCPAPNAAGGPSVFIFPPKIKDVLMISLS
PIVTCVVVDVSEDDPDVQISWFVNNVEVHTAQTQTHREDYNSTLRVVSAL
PIQHQDWMSGKEFKCKVNNKDLGAPIERTISKPKGSVRAPRVYVLPPPEE
EMTKKQVTLTCMVTDFMPEDIYVEWTNNGKTELNYKNTEPVLVSDGSYT
MYSKLRVEKKNWVERNSYSCSVVHEGLHNHHTTKSFSRTPG

[0527] Briefly, 10⁶ CT26-Tyrp1 colon carcinoma cells were injected subcutaneously into the flank of Balb/c mice. On Day 14 after tumor inoculation, when tumor volume reached 270 mm³, the mice were randomized into different treatment groups (n=10 per group) and treated intraperitoneally with 1 μg of rmIL-12, DF-mIL-12-Fc wt at a molar dose equivalent to 1 μg rmIL-12, DF-mIL-12-Fc si at a molar dose equivalent to 1 μg rmIL-12, or 1 μg of mIgG2a isotype control once a week. Tumor growth was assessed for 60 days.

[0528] As shown in FIGS. 2A-2C, although IL-12 (FIG. 2A) and DF-mIL-12-Fc wt (FIG. 2B) were efficient in controlling tumor progression in some mice, only DF-mIL-12-Fc si induced robust tumor regression and yielded 100% complete tumor regression (FIG. 2C). Moreover, overall survival was significantly extended by the treatment of DF-mIL-12-Fc si therapy—100% of treated mice were still alive at day 60, whereas median survival times of the mice treated with isotype control, DF-mIL-12-Fc wt, and IL-12 were 27 days, 33 days, and 46 days, respectively (FIG. 3).

[0529] Next, different doses of DF-mIL-12-Fc wt and DF-mIL-12-Fc si in controlling tumor progression were compared. Briefly, 10⁶ CT26-Tyrp1 colon carcinoma cells were injected subcutaneously into the flank of Balb/c mice. On Day 14 after tumor inoculation, when tumor volume reached 300 mm³, the mice were randomized into different treatment groups (n=10 per group) and treated intraperitoneally with DF-mIL-12-Fc wt at molar doses equivalent to 1 μg or 0.1 μg rmIL-12, or DF-mIL-12-Fc si at molar doses equivalent to 1 μg or 0.1 μg IL-12 once a week. Tumor growth was assessed for 55 days.

[0530] As shown in FIGS. 4A-4D, treatment with DF-mIL-12-Fc wt led to reduced tumor progression in some mice and complete regression in two mice at the 1 μg rmIL-12 molar equivalents dose (FIG. 4A), but no tumor suppression was observed at the 0.1 μg IL-12 molar equivalents dose (FIG. 4C). By contrast, the DF-mIL-12-Fc si treatment at the 1 μg IL-12 molar equivalents dose yielded 100% complete tumor regression (FIG. 4B) and induced a robust delay in tumor growth at the lower dose of 0.1 μg IL-12 molar equivalents (FIG. 4D). The median survival of the mice treated with 1 μg IL-12 molar equivalents of DF-mIL-12-Fc wt was 32 days, similar to the 34 days of median survival of the mice treated with 0.1 μg IL-12 molar equivalents of DF-mIL-12-Fc si, suggesting that DF-mIL-12-Fc si was 10-fold more potent than its wildtype variant (FIG. 5). DF-mIL-12-Fc wt was not efficient at the dose of 0.1 μg IL-12 molar equivalents, and showed the same median survival of 24 days as the isotype treated group.

[0531] Next, in vivo efficacy for different routes of administering DF-mIL-12-Fc si were compared. Briefly, 10⁶ CT26-Tyrp1 colon carcinoma cells were injected subcutaneously into the flank of Balb/c mice. On Day 14 after tumor inoculation, when tumor volume reached 270 mm³, the mice were randomized into different treatment groups (n=10 per group) and treated either intraperitoneally or subcutaneously with DF-mIL-12-Fc si at a molar dose equivalent to 1 μg IL-12 or molar equivalent of mIgG2a isotype control once a week. Tumor growth was assessed for over 60 days.

[0532] As shown in FIGS. 19A-19B, both intraperitoneal (FIG. 19A) and subcutaneous (FIG. 19B) administration of DF-mIL-12-Fc si induced robust tumor regression and yielded 100% complete tumor regression. Thus, DF-mIL-12-Fc si treatment demonstrated efficacy using various routes of administration.

### Example 3—Tumor Suppression by IL-12 Fused with a Silent Fc Domain Polypeptide in a B16F10 Tumor Model

[0533] This example describes relative abilities of DF-mIL-12-Fc wt and DF-mIL-12-Fc si in controlling tumor progression in a mouse melanoma model. Briefly, 10⁶ B16F10 melanoma cells were injected subcutaneously into C57BL/6 mice. On Day 8 after tumor inoculation, when tumor volume reached 250 mm³, the mice were randomized into different treatment groups (n=10) and treated with 0.5 μg of IL-12, DF-mIL-12-Fc wt at a molar dose equivalent to 0.5 μg IL-12, DF-mIL-12-Fc si at a molar dose equivalent to 0.5 μg IL-12, or 0.5 μg of mIgG2a isotype control once a week. Tumor growth was assessed for 32 days.

[0534] As shown in FIGS. 6A-6C, although each of the IL-12-Fc constructs tested delayed tumor progression, DF-mIL-12-Fc si was the most efficient in controlling tumor growth. Median survival time of the mice treated with DF-mIL-12-Fc si was 29 days, which was longer than the median survival times of the mice treated with isotype control, DF-mIL-12-Fc wt, and IL-12, which were 16 days, 26 days, and 22 days, respectively (FIG. 7).

[0535] Next, different doses of DF-mIL-12-Fc wt and DF-mIL-12-Fc si in controlling tumor progression were compared. Briefly, 10⁶ B16F10 melanoma cells were injected subcutaneously into the flank of C57BL/6 mice. On Day 8 after tumor inoculation, the mice were randomized into different treatment groups (n=10 per group) and treated intraperitoneally with 0.5 μg or 0.1 μg IL-12 molar equivalents of DF-mIL-12-Fc wt, or 0.5 μg or 0.1 μg IL-12 molar equivalents of DF-mIL-12-Fc si once a week. Tumor growth was assessed for 30 days.

[0536] As shown in FIGS. 8A-8D, DF-mIL-12-Fc si was superior to DF-mIL-12-Fc wt in suppression of tumor growth at both doses. Moreover, at each dose, the median survival of the mice treated with DF-mIL-12-Fc wt was 20 days. By contrast, the median survival of the mice treated with 0.1 μg IL-12 molar equivalents of DF-mIL-12-Fc si was 21 days, and the median survival of the mice treated with 0.5 μg IL-12 molar equivalents of DF-mIL-12-Fc si was 28 days (FIG. 9). These results demonstrated that a high dose (0.5 μg IL-12 molar equivalents) of DF-mIL-12-Fc si significantly increased the survival of mice compared to its wildtype counterpart or isotype control.

[0537] Next, single dose administrations of the DF-mIL-12-Fc si treatment was compared to the weekly treatments previously described. Briefly, 10⁶ B16F10 melanoma cells were injected subcutaneously into C57BL/6 mice. On Day 8 after tumor inoculation, when tumor volume reached 200 mm³, the mice were randomized into different treatment groups (n=10) and treated with DF-mIL-12-Fc si at a molar dose equivalent to 0.5 μg IL-12 or molar equivalent of mIgG2a isotype control once a week. Tumor growth was assessed for 39 days.

[0538] As shown in FIG. 20, a single administration of DF-mIL-12-Fc si resulted in reduced tumor outgrowth in 100% of mice, although tumor outgrowth occurred sooner when compared to weekly administrations (FIG. 6C). Additionally, mice demonstrated transient weight loss, but after the first dose only (data not shown). Accordingly, a single administration of DF-mIL-12-Fc si demonstrated initial efficacy in a hard-to-treat tumor model, although subsequent weekly administrations are better at delaying tumor outgrowth in this model.

[0539] Next, in vivo efficacy for different routes of administering DF-mIL-12-Fc si were compared. Briefly, 10⁶ B16F10 melanoma cells were injected subcutaneously into C57BL/6 mice. On Day 7 after tumor inoculation, when tumor volume reached 260 mm³, the mice were randomized into different treatment groups (n=10) and treated either intraperitoneally or subcutaneously with DF-mIL-12-Fc si at a molar dose equivalent to 1 μg IL-12 or molar equivalent of mIgG2a isotype control once a week. Tumor growth was assessed for 40 days.

[0540] As shown in FIGS. 21A-21B, both intraperitoneal (FIG. 21A) and subcutaneous (FIG. 21B) administration of DF-mIL-12-Fc si induced tumor regression in 100% of mice. Thus, DF-mIL-12-Fc si treatment demonstrated efficacy using various routes of administration.

### Example 4—In Vitro Potency of DF-hIL-12-Fc Wt and rhIL-12

[0541] The potency of DF-hIL-12-Fc si in comparison to rhIL-12 was assessed using in vitro bioassays.

[0542] IL-12 potency was assessed using a HEK-Blue IL-12 reporter assay. IL-12R+ HEK-Blue reporter cells (InvivoGen) were harvested from culture and adjusted to 1×10⁶ cells/mL in culture media. DF-hIL-12-Fc si (DF IL-12-Fc) and recombinant human IL-12 (rhIL-12; PeproTech) were diluted in media. 100 μL of PBMC suspension was mixed with 100 μL of diluted test article and incubated for 48 hours. The supernatant was harvested and engagement of IL-12 receptor and signaling components stably expressed by the reporter cells was detected by measurement of secreted embryonic alkaline phosphatase from the cells following manufacturer instructions. Briefly, 25 μL of sample supernatant was mixed with 200 μL of QUANTI-Blue reagent and incubated in the dark at RT for 10 minutes. The plate was then read with a SpectraMax i3x plate-reader at 620 nM and optical density reported to represent relative IL-12 activity.

[0543] As shown in FIG. 10A, production of SEAP by IL-12R+HEK reporter cells increased with increasing concentrations of DF-hIL-12-Fc si or rhIL-12. The measured IL-12 responses in the HEK-Blue reporter assay were comparable between DF-hIL-12-Fc si and rhIL-12 at the concentrations examined.

[0544] Next, IL-12 potency was assessed by quantifying IFNγ production from human PBMCs. PBMCs were isolated from human peripheral blood buffy coats using density gradient centrifugation and adjusted to 1×10⁶ cells/mL in culture media. DF-hIL-12-Fc si and recombinant human IL-12 (rhIL-12) were diluted in media. 100 μL of PBMC suspension was mixed with 100 μL of diluted test article and incubated for 48 hrs. The supernatant was harvested and IFNγ was quantified using a Human IFN-7 ELISA MAX kit (BioLegend). After development of the IFNγ ELISA plates, they were read using a SpectraMax i3x instrument at 450 nm with a background subtraction at 540 nm. IFNγ content in sample wells was approximated by interpolating sample readings from the assay standard curve.

[0545] As shown in FIG. 10B, IFNγ production increased when human PBMCs were cultured with DF-hIL-12-Fc si or rhIL-12, with concurrent treatment with 5 μg/ml of PHA to amplify the magnitude of IFNγ responses. IFN-7 production following IL-12 stimulation was comparable between DF-hIL-12-Fc si and rhIL-12 at the concentrations examined.

[0546] Accordingly, although the EC50 values with the two cell types and stimulation conditions differed by over an order of magnitude, comparable activity of DF-hIL-12-Fc si and rhIL-12 was demonstrated in both assays suggesting the potency of the DF-hIL-12-Fc si construct exhibits similar potency to that of native recombinant human IL-12.

### Example 5—IL-12, DF-hIL-12-Fc Si and IFNγ Concentrations in Monkey Plasma Following IV Infusion of DF-hIL-12-Fc Si or rhIL-12

[0547] The pharmacodynamics (PD) and pharmacokinetics (PK) were assessed in cynomolgus monkeys following IV infusion of DF-hIL-12-Fc si or rhIL-12.

[0548] Cynomolgus monkeys were administered DF-hIL-12-Fc si and recombinant human IL-12 at 10 μg/kg by IV-infusion.

[0549] An immunoassay was used to detect DF-hIL-12-Fc si and Human IL-12 based on a Quantikine ELISA Human IL-12 p70 Immunoassay kit: This assay employed the quantitative sandwich enzyme immunoassay technique. A monoclonal antibody specific for human IL-12 p70 was used as a solid phase capture and detection was accomplished using an antibody HRP-tagged reporter. Standards and QCs spiked with rhIL-12 or DF-hIL-12-Fc si reference standard, along with test samples were pipetted into the wells of microtiter plate and any IL-12 p70 present in the samples were bound by the immobilized antibody, on the solid phase. Unbound substances were washed away and the enzyme-linked polyclonal antibody specific for human IL-12 p70 was added to the wells. Unbound antibody-enzyme reagents were washed away and TMB substrate was added to each well. The resulting enzyme reaction yields a blue product that turns yellow when an acid stop solution is added. The intensity of the color measured in each well is directly proportional to the amount of rhIL-12 or DF-hIL-12-Fc si is bound in the initial step. Plates were read at 450 nm with a reference of 540 nm on a SpectraMax microplate reader with data collection software, SoftMax Pro Enterprise version 4.6. Data was converted into a text file and imported/processed in Watson LIMS v.7.2.0.02. Regression was performed using a Logistic (Auto Estimate) curve fitting with a weighting factor of 1.

[0550] An immunoassay (meso scale discovery (MSD)—an ELISA like immunoassay) was also used to detect DF-hIL-12-Fc si that involved coating an untreated MSD microtiter plate with monkey-adsorbed goat anti-human IgG and incubating at room temperature. The plate was washed, blocked, washed, and incubated with standard curve and quality control samples spiked with DF-hIL-12-Fc si reference standard, along with test samples. After this incubation, the plate was washed and biotin anti-human IL-12/IL-23 p40 was added to the plate as the primary detection antibody. After another wash step, streptavidin-conjugated Sulfo-Tag was added as the secondary detection antibody. The plate was washed a final time, MSD Read Buffer T was added to the plate, and the plate was read using a MSD Sector Imager S600. Raw MSD data was exported into a text file, which was then converted into a Watson LIMS compatible file using a programmed Excel spreadsheet, which was custom designed at Envigo. Data was imported and regressed in Watson LIMS Software v.7.2.0.02.

[0551] A meso scale discovery method was performed for the relative quantitative measurement of NHP proinflammatory biomarkers in cynomolgus monkey plasma. The methed used a sandwich immunoassay procedure for the relative quantitative measurement of Pro-inflammatory Panel 1 Biomarkers: IFNγ, IL-10, IL-2, IL-6 IL-8, and IL-10 in cynomolgus monkey K2 EDTA plasma (referred to as monkey plasma). The method is based on MSD non-human primate (NHP) kits for V-PLEX and V-PLEX Plus, Catalog No. K15056D-1, K15056D-2, K15056D-4, K15056D-6, K15056G-1, K15056G-2, K15056G-4, K15056G-6. The method employs human capture and detection antibodies that react with cynomolgus monkeys. The kit provides plates pre-coated with capture antibodies on independent well-defined spots in each well of a 96-well multi-spot plate. The plate was incubated with monkey plasma samples, washed and then incubated with detection antibodies (specific for each analyte) that are conjugated with electrochemiluminescent (ECL) labels (MSD SULFO-TAG). Analytes in the sample bind to capture antibodies immobilized on the working electrode surface; recruitment of the detection antibodies by the bound analytes completes the sandwich. The plate was washed and an MSD Read Buffer was added to create the appropriate chemical environment for electrochemiluminiscence (ECL). The plate was loaded into an MSD Sector Imager 600 (SI600) instrument where a voltage was applied to the plate electrodes causing the captured labels to emit light. The instrument measures the intensity of emitted light in terms of Relative Light Units (RLU) to provide a relative quantitative measure of analytes in the sample. Raw RLU data was exported into a text file, which then was converted into a Watson LIMS compatible file using a programmed Excel spread sheet, which was custom designed at Envigo. Data was subsequently imported and regressed in Watson LIMS Software v.7.2.0.02.

[0552] FIG. 11 shows the relative plasma concentrations of DF-hIL-12-Fc si and recombinant human IL-12 over time following IV-administration. The data indicate that concentrations of DF-hIL-12-Fc si and rhIL-12 decreased over time, as expected. However, DF-hIL-12-Fc si demonstrated a prolonged half-life and overall greater exposure compared to rhIL-12 over the time course.

[0553] FIG. 11 also shows the relative concentrations of IFNγ (PD) in monkey plasma following IV-administration. The data indicate that the pharmacodynamics of DF-hIL-12-Fc si and rhIL-12, as assessed by IFNγ production, both demonstrated activity following IV-administration. However, DF-hIL-12-Fc si demonstrated a higher peak activity and a longer duration compared to rhIL-12.

### Example 6—Pharmacological Characterization of the Mouse Surrogate DF-mIL-12-Fc Si

[0554] The serum half-life and in vivo pharmacodynamics of a half-life prolonged murine IL-12 variant, designated DF-mIL-12-Fc si, was examined.

[0555] An equivalent molar amount of DF-mIL-12-Fc si, corresponding to 1 μg IL-12, was intravenously injected in non-tumor bearing Balb/c mice and PK/PD characteristics were compared to IL-12. Naïve Balb/c (n=6) were injected intravenously with 1 μg DF-mIL-12-Fc si and IL-12 (equivalent molar to 1 μg IL-12). Blood was sampled at 0.017, 0.5, 3, 6, 24, 48, 72, 96, 144 and 219 hours post-injection. IL-12 and IFNγ levels in serum were analyzed by ELISA, as previously described.

[0556] As shown in FIGS. 12A and 12B and quantified in Table 15, DF-mIL-12-Fc si showed protracted serum half-life of approximately 30 hours (FIG. 12B, DF-mIL-12-Fc si T_{1/2}=29.85 hours), which was 5 times longer than that of IL-12 (FIG. 12A; IL-12 T_{1/2}=6.05 hours). In addition to an extended half-life, DF-mIL-12-Fc si-mediated IFNγ production (AUC=916654) was also prolonged compared to IL-12 (AUC=20304).

[0557] Next, the PK/PD properties for different routes of administering DF-mIL-12-Fc si were compared. An equivalent molar amount of DF-mIL-12-Fc si, corresponding to 1 μg IL-12, was injected as a single dose in non-tumor bearing Balb/c mice by intravenous, intraperitoneal, or subcutaneous administration and PK/PD characteristics were assessed, as described.

[0558] As shown in FIGS. 12C-12E and quantified in Table 16, intravenous (FIG. 12C), intraperitoneal (FIG. 12D), or subcutaneous (FIG. 12E) administration all resulted in DF-mIL-12-Fc si-mediated IFNγ production comparable across the different routes of administration. Notably, subcutaneous administration resulted in a lower IL-12 Cₘₐₓ. Accordingly, the pharmacokinetic properties (e.g., IL-12 concentration) of DF-mIL-12-Fc si administration varied depending on the route of administration, while the pharmacodynamic properties (IFNγ production) remained protracted and relatively comparable across the different routes.

TABLE 15
Pharmacological characteristics of DF-mIL-12-Fc si and rmIL-12

| | IL-12 | | | | | IFNγ |
|---|---|---|---|---|---|---|
| | T_{1/2} | Span | Tₘₐₓ | Cₘₐₓ | AUC | AUC |
| rmIL-12 | 6.05 | 9.15 | 0.13 | 358.65 | 999.81 | 20304 |
| DF-mIL-12-Fc | 29.85 | 6.92 | 0.19 | 258.20 | 5636.49 | 916654 |

TABLE 16
Pharmacological characteristics of
DF-mIL-12-Fc si via IV, IP, and SC

| | T_{1/2} | Span | Tₘₐₓ | Cₘₐₓ | AUC |
|---|---|---|---|---|---|
| Intravenous | 31.5 | 6.4 | 0.2 | 257.2 | 5985.6 |
| Intraperitoneal | 34.70 | 5.19 | N/A | 75.09 | 3964.21 |
| Subcutaneous | 37.5 | 4.1 | 36.0 | 23.1 | 1938.1 |

### Example 7—Combination of DF-mIL-12-Fc Si and PD-1 Blockade in B16F10 Mouse Model

[0559] Combination therapy of DF-mIL-12-Fc si and PD-1 blockade was performed to analyze whether anti-tumor immune response can be amplified in established B16F10 tumors.

[0560] C57BL/6 mice were injected with 10⁶ B16F10 melanoma cells subcutaneously into the flank of mice. On Day 8 after tumor inoculation, mice were randomized (n=10 per group). When average tumor volume reached ˜245 mm³, mice were treated intraperitoneally with 0.5 μg isotype control, 0.5 μg DF-mIL-12-Fc si, 200 μg anti-PD-1 clone RMP1-14, or combined DF-mIL-12-Fc si/anti-PD-1. Animals were injected once a week with DF-mIL-12-Fc si and twice weekly with anti-PD-1. Tumor growth was assessed for 60 days, and survival and body weight was monitored.

[0561] As shown in FIGS. 13A-13C, while administration of DF-mIL-12-Fc si alone delayed tumor regression (FIG. 13A) and PD-1 alone had a minimal effect on tumor growth (FIG. 13B), the combination of DF-mIL-12-Fc si with PD-1 blockade further delayed tumor growth (FIG. 13C), suggesting anti-PD-1 treatment further amplified anti-tumor responses to DF-mIL-12-Fc si treatment.

[0562] As shown in FIGS. 14A and 14B, overall survival with DF-mIL-12-Fc si therapy and in combination with PD-1 blockade was extended showing a median survival of 29 days (DF-mIL-12-Fc si monotherapy) and 36 days (combination) compared to 15 days of isotype and 17.5 days of 200 μg anti-PD-1 treated mice (FIG. 14A). Notably, despite the high response rate, the regimen of DF-mIL-12-Fc si and combination therapy appeared to be well tolerated by B16F10 tumor-bearing mice (FIG. 14B).

[0563] Accordingly, a combination therapy of DF-mIL-12-Fc si and PD-1 blockade demonstrated improved efficacy compared to either treatment alone.

### Example 8—Combination of DF-mIL-12-Fc Si and with mcFAE-C26.99 TriNKETs in B16F10 Mouse Model

[0564] Combination therapy of DF-mIL-12-Fc si and mcFAE-C26.99 TriNKETs was performed to analyze whether anti-tumor immune response can be amplified in established B16F10 tumors.

[0565] C57BL/6 mice were injected with 10⁶ B16F10 melanoma cells subcutaneously into the flank of the mice. On Day 7 after tumor inoculation mice were randomized (n=10 per group). When tumor average reached 200 mm³, mice were treated intraperitoneally with 150 μg isotype control, or 0.5 μg DF-mIL-12-Fc si, 150 μg TriNKET, or the combination DF-mIL-12-Fc si/TriNKET. Tumor growth was assessed for 60 days, and survival and body weight was monitored.

[0566] As shown in FIG. 15A, monotherapy with DF-mIL-12-Fc si led to reduced tumor growth. Treatment with mcFAE-C26.99 TriNKET as single agent at a starting tumor volume of 200 mm³ did not result in delayed tumor progression (FIG. 15B). In contrast, the combination of DF-mIL-12-Fc si with mcFAE-C26.99 further enhanced anti-tumor responses in comparison to DF-mIL-12-Fc si alone (FIG. 15C) and resulted in 30% complete responders (CR) (n=3), suggesting TriNKET treatment further amplified anti-tumor responses to DF-mIL-12-Fc si treatment.

[0567] As shown in FIG. 16A, overall survival with DF-mIL-12-Fc si therapy and in combination with mcFAE-C26.99 TriNKET was extended showing a median survival of 29 days (DF-mIL-12-Fc si monotherapy) and 60 days (TriNKET combination) compared to 16 days of isotype and 17 days of TriNKET treated mice. Notably, despite the high response rate, the regimen of DF-mIL-12-Fc si and combination therapy appeared to be well tolerated by B16F10 tumor-bearing mice (FIG. 16B).

[0568] The three complete responders (the CRs from the experiment described above and the data presented in FIG. 15C) were re-challenged with 2×10⁶ B16F10 melanoma cells 72 days after first tumor inoculation. Age-matched naïve C57BL/6 mice were used as control group. 1 out of 3 mice from the initial DF-mIL-12-Fc si/TriNKET combo treated group remained tumor-free, another mouse showed tumor formation starting at day 95 and the tumor progression of the third mouse was similar to the age-matched control group (FIG. 17), suggesting the formation of immunological memory with combination therapy.

[0569] Accordingly, a combination therapy of DF-mIL-12-Fc si and TriNKETs demonstrated improved efficacy compared to either treatment alone, including demonstrating a complete, durable response in a population of mice.

### Example 9—Treatment with DF-mIL-12-Fc Si Promotes Complete Recovery in CT26 Tumor Model

[0570] This example shows that treatment with DF-mIL-12-Fc si promotes recovery in mice bearing CT26 tumors.

[0571] Briefly, 10⁶ CT26-Tyrp1 colon carcinoma cells were injected subcutaneously into the flank of Balb/c mice. On Day 14 after tumor inoculation, when tumor volume reached 270 mm³, the mice were randomized into different treatment groups and intraperitoneally injected with 1 μg of DF-mIL-12-Fc si at a molar dose equivalent to 1 μg rmIL-12 or 1 μg of mIgG2a isotype control once a week. Tumor growth was assessed for 60 days. The complete responders were re-challenged with 10⁶ CT26 cells 72 days after first tumor inoculation. Age-matched naïve Balb/C mice were used as control group.

[0572] FIG. 18A is a graph showing tumor growth curves of individual mice inoculated with CT26 tumor cells and administered a single dose of 1 μg of DF-mIL-12-Fc si or mIgG2a isotype. FIG. 18B is a graph showing body weights of individual mice inoculated with CT26 tumor cells and administered a weekly dose of 1 μg of DF-mIL-12-Fc si or mIgG2a isotype. FIG. 18C is a graph showing tumor growth curves of individual mice re-challenged with inoculation of CT26 tumor cells.

[0573] As shown in FIGS. 18A-B, administration of DF-mIL-12-Fc si resulted in robust tumor regression in comparison to mIgG2a isotype with no observable toxicity affecting the body weight of treatment animals. As shown in FIG. 18C, the initial DF-mIL-12-Fc si treated mice remained tumor-free suggesting the formation of immunological memory with DF-mIL-12-Fc si treatment.

### Example 10—DF mIL-12-Fc Si Delivered Intraperitoneally or Subcutaneously is Effective to Reduce Tumor Volume in CT26 Tumor Model

[0574] This example shows that intraperitoneal or subcutaneous administration of DF-mIL-12-Fc si ensures 100% complete recovery in mice bearing CT26 tumors.

[0575] Briefly, 10⁶ CT26-Tyrp1 colon carcinoma cells were injected subcutaneously into the flank of Balb/c mice. On Day 14 after tumor inoculation, when tumor volume reached 270 mm³, the mice were randomized into different treatment groups and intraperitoneally injected with 1 μg of DF-mIL-12-Fc si at a molar dose equivalent to 1 μg IL-12 or 1 μg of mIgG2a isotype control once a week, or subcutaneously injected with 1 μg of DF-mIL-12-Fc si at a molar dose equivalent to 1 μg IL-12 or 1 μg of mIgG2a isotype control once a week. Tumor growth was assessed for more than 60 days.

[0576] FIG. 19A is a graph showing tumor growth curve of individual mice inoculated with CT26 tumor cells and administered a weekly dose of 1 μg of DF-mIL-12-Fc si or mIgG2a isotype delivered intraperitoneally. FIG. 19B is a graph showing tumor growth curve of individual mice inoculated with CT26 tumor cells and administered a weekly dose of 1 μg of DF-mIL-12-Fc si or mIgG2a isotype delivered subcutaneously.

[0577] As shown in FIGS. 19A-B, either intraperitoneal or subcutaneous delivery of DF-mIL-12-Fc si was effective at reducing CT26 tumor volume.

### Example 11—Single Dose Administration of DF-mIL-12-Fc Si is Effective to Reduce Tumor Volume in B16F10 Mouse Model

[0578] This example shows that a single dose of DF-m112-Fc si is effective at reducing tumor volume in mice bearing B16F10 melanoma tumors.

[0579] In brief, C57BL/6 mice were injected with 10⁶ B16F10 melanoma cells subcutaneously into the flank of the mice. On Day 7 after tumor inoculation mice were randomized. When tumor average reached 200 mm³, mice were treated intraperitoneally with a single dose of isotype control, or 1 μg of DF-mIL-12-Fc si. Tumor growth was assessed for 50 days.

[0580] As shown in FIG. 20, a single administration of μg of DF-mIL-12-Fc si is effective to reduce tumor volume in B16F10 tumor-bearing mice.

### Example 12—DF-mIL-12-Fc Si Delivered Intraperitoneally or Subcutaneously is Effective to Reduce Tumor Volume in B16F10 Mouse Model

[0581] This example shows that intraperitoneal or subcutaneous administration of DF-mIL-12-Fc si led to 100% complete recovery in mice bearing B16F10 melanoma tumors.

[0582] Briefly, 10⁶ B16F10 melanoma cells were injected subcutaneously into the flank of C57BL/6 mice. On Day 7 after tumor inoculation, mice were randomized. When tumor average reached 200 mm³, mice were intraperitoneally injected with 1 μg of DF-mIL-12-Fc si at a molar dose equivalent to 1 μg IL-12 or 1 μg of mIgG2a isotype control once a week, or subcutaneously injected with 1 μg of DF-mIL-12-Fc si at a molar dose equivalent to 1 μg IL-12 or 1 μg of mIgG2a isotype control once a week. Tumor growth was assessed for 40 days.

[0583] As shown in FIGS. 21A-B, either intraperitoneal or subcutaneous delivery of DF-mIL-12-Fc si was effective at reducing B16F10 tumor volume as compared to isotype control.

### Example 13—DF-mIL-12-Fc Si is Efficacious as a Single Dose

[0584] This example shows that DF-mIL-12-Fc si is effective at reducing CT26 tumor volume when administered as a single dose, and when administered via repeat dosing, is even more effective.

[0585] Briefly, 10⁶ CT26-Tyrp1 colon carcinoma cells were injected subcutaneously into the flank of Balb/c mice. On Day 14 after tumor inoculation, when tumor volume reached 270 mm³, the mice were randomized into different treatment groups (n=10 per group) and intraperitoneally injected with a single dose of 1 μg of DF-mIL-12-Fc si at a molar dose equivalent to 0.1 μg IL-12 or 1 μg of mIgG2a isotype control once a week. Alternatively, mice were intraperitoneally injected with 1 μg of DF-mIL-12-Fc si at a molar dose equivalent to 1 μg IL-12 or 1 μg of mIgG2a isotype control once a week. Tumor growth was assessed for more than 60 days.

[0586] FIG. 22A is a graph showing tumor growth curve of individual mice inoculated with CT26 tumor cells and administered a single dose of 1 μg of DF-mIL-12-Fc si or mIgG2a isotype. FIG. 22B is a graph showing tumor growth curve of individual mice inoculated with CT26 tumor cells and administered a weekly dose of 1 μg of DF-mIL-12-Fc si or mIgG2a isotype.

[0587] As shown in FIG. 18A and FIG. 22A, a single administration of 1 μg of DF-mIL-12-Fc si resulted in robust 70% complete recovery of tumor-bearing mice as compared to mIgG2a isotype. However, as shown in FIG. 2C and FIG. 22B, repeat weekly dosing of 1 μg of DF-mIL-12-Fc si ensured 100% complete recovery of tumor-bearing mice as compared to mIgG2a isotype. As shown in FIG. 18B, even repeat administration of DF-mIL-12-Fc si was well-tolerated with no toxicities observed, as assessed by body weight.

[0588] Additionally, complete responders (CR) were re-challenged with 5×10⁵ CT26-Tyrp1 colon carcinoma cells at the opposite flank and tumor progression was compared to naïve mice challenged at the same tumor dose. As shown in FIG. 18C, while tumors grew in naïve mice, 100% of complete responders remained tumor-free following re-challenge. Accordingly, a single administration of DF-mIL-12-Fc si demonstrated a complete, durable response in a population of mice.

### Example 14—Pharmacokinetics in Cynomolgus Monkeys Treated with a Single Subcutaneous Dose of DF-hIL-12-Fc Si

[0589] Pharmacokinetics were determined following a subcutaneous injection of DF-hIL-12-Fc si at 1 μg/kg (FIG. 25A), 2 μg/kg (FIG. 25B), or 4 μg/kg (FIG. 25C) in cynomolgus monkeys utilizing an ELISA like immunoassay-Meso Scale Discovery (MSD) immunoassay method. Briefly, an untreated MSD microtiter plate was coated with monkey-adsorbed goat anti-human IgG and incubated at room temperature. Following coating and incubation, the plate was washed, blocked, washed, and incubated with standard curve and quality control samples spiked with a DF-hIL-12-Fc si reference standard, along with test samples. Following incubation, the plate was washed and biotin anti-human IL-12/IL-23 p40 was added to the plate as the primary detection antibody. Following another wash step, streptavidin-conjugated Sulfo-Tag was added as the secondary detection antibody. The plate was washed a final time before adding MSD read buffer T to the plate. The plate was read using an MSD Sector Imager S6000.

[0590] FIGS. 25A-25C are line graphs showing pharmacokinetics in cynomolgus monkeys treated with a single subcutaneous dose of 1 μg/kg (FIG. 25A), 2 μg/kg (FIG. 25B), or 4 μg/kg (FIG. 25C) of DF-hIL-12-Fc si.

[0591] The data indicate that concentrations of DF-hIL-12-Fc si and rhIL-12 decreased over time, as expected, with similar pharmacokinetic profiles at all doses tested.

### Example 15—Cytokine Release in Cynomolgus Monkeys Treated with a Single Subcutaneous Dose of DF-hIL-12-Fc Si

[0592] Quantitative measurements of cytokines following a subcutaneous injection of DF-hIL-12-Fc si at 1 μg/kg (FIGS. 26A and 26B), 2 μg/kg (FIGS. 26C and 26D), or 4 μg/kg (FIGS. 26E and 26F) in cynomolgus monkeys were determined using MSD immunoassay kits. The method used sandwich immunoassay kits (Pro-inflammatory Panel 1 Biomarkers and V-PLEX Plus Chemokine Panel 1 NHP Kit) for the relative quantitative measurement of Pro-inflammatory Panel 1 Biomarkers: IFNγ, IL-1β, IL-2, IL-6 IL-8, and IL-10 in cynomolgus monkey K2 EDTA plasma (referred to as monkey plasma). The method is based on MSD non-human primate (NHP) kits for V-PLEX and V-PLEX Plus, Catalog No. K15056D-1, K15056D-2, K15056D-4, K15056D-6, K15056G-1, K15056G-2, K15056G-4, K15056G-6. The method employs human capture and detection antibodies that react with cynomolgus monkeys. The kit provides plates pre-coated with capture antibodies on independent, well-defined spots within each well of a 96-well multi-spot plate. The plate was incubated with monkey plasma samples, washed and then incubated with detection antibodies (specific for each analyte) that are conjugated with electrochemiluminescent (ECL) labels (MSD SULFO-TAG). Analytes in the sample bind to capture antibodies immobilized on the working electrode surface; recruitment of the detection antibodies by the bound analytes completes the sandwich. The plate was washed and an MSD Read Buffer was added to create the appropriate chemical environment for electrochemiluminiscence (ECL). The plate was loaded into an MSD Sector Imager 600 (SI600) instrument where a voltage was applied to the plate electrodes causing the captured labels to emit light. The instrument measures the intensity of emitted light in terms of Relative Light Units (RLU) to provide a relative quantitative measure of analytes in the sample. Raw RLU data was exported into a text file, which then was converted into a Watson LIMS compatible file using a programmed Excel spread sheet, which was custom designed at Envigo. Data was subsequently imported and regressed in Watson LIMS Software v.7.2.0.02.

[0593] FIGS. 26A-26F are line graphs showing concentrations of IFNγ (FIGS. 26A, 26C, and 26E) and IP10/CXCL10 (FIGS. 26B, 26D, and 26F) in cynomolgus monkeys treated with a single subcutaneous dose of 1 μg/kg (FIGS. 29A and 29B), 2 μg/kg (FIGS. 26C and 26D), or 4 μg/kg (FIGS. 26E and 26F) of DF-hIL-12-Fc si.

[0594] As shown in FIG. 26A, a single subcutaneous dose of DF-hIL-12-Fc si at 1 μg/kg did not result in detectable levels of IFNγ. Subcutaneous doses of DF-hIL-12-Fc si at 2 μg/kg and 4 μg/kg, resulted in an increase in IFNγ levels in some animals that peaked at day 4 post-dosing (FIGS. 26C and 26E). Subcutaneous doses of DF-hIL-12-Fc si at 1 μg/kg, 2 μg/kg, and 4 μg/kg all resulted in elevated IP10/CXCL10 levels that peaked at day 4 post-dosing (FIGS. 26B, 26D, and 26F).

### Example 16—DF-mIL-12-Fc Si Combination Therapy Using Radiation or Chemotherapy in 4T1 Orthotopic Mouse Model

[0595] In order to show whether anti-tumor activity elicited by administration of DF-mIL-12-Fc si can be amplified, combination studies using radiation or chemotherapy were performed. Briefly, Balb/c mice were injected orthotopically into the mammary fat pad with 5×10⁵ 4T1-luc tumor cells. On Day 14 after tumor inoculation, mice were randomized (n=10 per group). Mice were treated subcutaneously with either isotype, DF-mIL-12-Fc si (both equimolar to 1 μg IL-12), 5 mg/kg Doxil® (chemotherapy) intravenously, or irradiated with 10 Gy as monotherapy, or DF-mIL-12-Fc si in combination with Doxil® or radiation. Tumor growth was assessed over time. FIG. 27 is a graph showing tumor growth curves of individual mice inoculated with breast cancer cells and administered a weekly dose of isotype control, DF-mIL-12-Fc si, Doxil (chemotherapy), or irradiated with 10 Gy as monotherapy or DF-mIL-12-Fc si in combination with Doxil® or radiation. Graph shows group averages of tumor growth±standard error mean.

[0596] As seen in FIG. 27, although monotherapy with DF-mIL-12-Fc si was effective by itself in 4T1 tumor-bearing mice, combination therapy amplified anti-tumor immune responses leading to full tumor regression in 10-30% of mice.

### Example 17—DF-mIL-12-Fc Si Mediated Anti-Tumor Efficacy Against Large, PD-1 Blockade-Resistant CT26 Colon Carcinoma Tumors

[0597] This example analyzes whether DF-mIL-12-Fc si elicited potent, anti-tumor responses against PD-1 blockade-resistant CT26-Tyrp1 tumors. Briefly, Balb/c mice were injected with 0.5×10⁶ CT26-Tyrp1 tumor cells. Following inoculation when average tumor volume reached ˜120 mm³, mice were randomized on Day 9. Mice were either treated with 200 μg isotype or anti-PD-1 antibody (twice weekly). FIG. 28A is a graph showing tumor growth curve of Balb/c mice inoculated with CT26-Tyrp1 tumor cells and treated (bi-weekly) either with isotype control or anti-PD-1 antibody. On day 17, the group previously treated with anti-PD-1 (with an average tumor volume ˜800 mm³) was subdivided into two treatment groups. Group 1 continued to receive PD-1 blockade treatment twice weekly, Group 2 received PD-1 blockade (twice weekly) along with DF-mIL-12-Fc si (1 μg weekly). FIG. 28B is a graph showing tumor growth curve of the previously anti-PD-1 antibody-treated Balb/c mice treated with anti-PD-1 antibody (bi-weekly) along with weekly treatment with 1 μg of DF-mIL-12-Fc si.

[0598] As shown in FIG. 28A, anti-PD-1 monotherapy failed to control tumor progression. However, as shown in FIG. 28B, the addition of DF-mIL-12-Fc si resulted in effective tumor regression.

### Example 18—Local Treatment of DF-mIL-12-Fc Si Against Large CT26 Colon Carcinoma Tumors Induces Abscopal Anti-Tumor Responses

[0599] This example shows whether DF-mIL-12-Fc si treatment can induce abscopal therapeutic effects. Briefly, Balb/c were implanted subcutaneously with CT26-Tyrp1 colon carcinoma cells on both the left (0.8×10⁶ tumor cells) and right (0.4×10⁶ tumor cells) flank. On Day 13 after tumor inoculation, left tumors were injected either with 0.1 μg isotype control or 0.1 μg DF-mIL-12-Fc si once weekly for 2-3 weeks. FIG. 29A is a graph showing tumor growth curve of the treated (Tr) tumor in Balb/c mice inoculated with CT26-Tyrp1 tumor cells and treated once (weekly) with either isotype control or DF-mIL-12-Fc si. Right tumors were left untreated (NT).

[0600] FIG. 29B is a graph showing tumor growth curves of the untreated (NT) tumors in Balb/c mice inoculated with CT26-Tyrp1 tumor cells.

[0601] As shown in FIGS. 29A-29B, control isotype-treated tumors grew progressively at both right and left sites. As shown in FIGS. 29A-29B, DF-mIL-12-Fc si caused effective anti-tumor responses at the local injected site (FIG. 29A) and the distant non-treated tumor (FIG. 29B) indicating abscopal therapeutic effects.

### Example 19—DF-mIL-12-Fc Si Mediated Anti-Tumor Efficacy Against Large CT26 Colon Carcinoma Tumors

[0602] This example shows that DF-mIL-12-Fc si which includes wild-type murine IL-12 p40 and p35 subunits fused to the N-termini of murine IgG2a Fc domain polypeptides with mutations L234A, L235A, and P329G (discussed in Example 2) is efficacious against larger tumor volumes.

[0603] DF-mIL-12-Fc si-mediated anti-tumor efficacy against large CT26 colon carcinoma tumors was tested. Briefly, Balb/c mice were injected subcutaneously with 10⁶ CT26-Tyrp1 colon carcinoma cells. On Day 18 after tumor inoculation, when tumor volume reached 800 mm³, the mice were randomized into different treatment groups (n=10 per group) and treated intraperitoneally with DF-mIL-12-Fc si at a molar dose equivalent to 1 μg or 2 μg IL-12, or molar equivalent of mIgG2a isotype once or once weekly.

[0604] Tumor growth was assessed for 65 days. FIG. 23A is a graph showing tumor growth curves of Balb/c mice inoculated with CT26-Tyrp1 tumor cells and treated once (weekly) with either 2 μg mIgG2a isotype control or 1 μg DF-mIL-12-Fc si. FIG. 23B is a graph showing tumor growth curves of Balb/c mice inoculated with CT26-Tyrp1 tumor cells and treated once (weekly) with either 2 μg mIgG2a isotype control or 2 μg DF-mIL-12-Fc si. FIG. 30A is a graph showing tumor growth curves of Balb/c mice inoculated with CT26-Tyrp1 tumor cells and treated once with either 2 μg mIgG2a isotype control or 2 μg DF-mIL-12-Fc si. FIG. 30B is a graph showing average tumor growth curves of Balb/c mice inoculated with CT26-Tyrp1 tumor cells and treated with 2 μg mIgG2a isotype control, 1 μg DF-mIL-12-Fc si (weekly administration), 2 μg DF-mIL-12-Fc si (weekly administration), or 2 μg DF-mIL-12-Fc si (once). FIGS. 23A, 23B, and 30A show tumor growth curves of individual mice. FIG. 30B shows tumor average±standard error mean.

[0605] As shown in FIGS. 23A, 23B, and 30B, weekly doses (1 μg or 2 μg) of DF-mIL-12-Fc si were efficient in controlling tumor progression and 100% of mice responded to DF-mIL-12-Fc si treatment. Additionally, as shown in FIG. 30A, a single treatment with 2 μg DF-mIL-12-Fc si showed tumor regression yielding a 100% response rate. The data and figures described in this example show that DF-mIL-12-Fc si is not only effective at reducing larger CT26 tumor volume but also effective at reducing CT26 tumor volume when administered as a single dose.

### Example 20—DF-mIL-12-Fc Si Treatment Against B16F10 Melanomas Induces Production of Cytokines and Chemokines in Serum and in Tumors

[0606] This example shows that DF-mIL-12-Fc si treatment results in elevated levels of IFNγ, CXCL9, and CXCL10 in blood and tunors of C57BL/6 mice bearing B16F10 tumors. Briefly, C57BL/6 mice were injected subcutaneously with 10⁶ B16F10 melanoma cells. On Day 7 after tumor inoculation (when average tumor volume reached 150 mm³), mice were randomized (n=8 per group). Mice were treated intraperitoneally with isotype control, IL-12, or DF-mIL-12-Fc equimolar to 1 μg IL-12.

[0607] After 72 hours post-treatment, serum and tumor lysates were prepared and analyzed for IFNγ (FIG. 24A), CXCL9 (FIG. 24B), and CXCL10 (FIG. 24C) expression using multiplex technology. FIGS. 31A-C show average cytokine/chemokine levels in mice.

[0608] As shown in FIGS. 24A-24C, a single administration of 0.5 μg of DF-mIL-12-Fc si resulted in increased expression of IFNγ (FIG. 24A), CXCL9 (FIG. 24B), and CXCL10 (FIG. 24C) in serum (left panel) and within tumors (right panel), whereas IL-12 treatment had little or no effect.

### Example 21—DF hIL-12-Fc Si Having LALAPA and LALAPG Mutations have Similar IFNγ-Stimulating Activity and Abrogated FcγR Binding

[0609] This example shows the IFNγ-stimulating and FcγR-binding activities of DF hIL-12-Fc si with IgG1 Fc having LALAPA (L234A, L235A, and P329A) mutations, or LALAPG (L234A, L235A, and P329G) mutations. In brief, human PBMCs were cultured for 2 days with both 5 μg/ml phytohemagglutinin (PHA) and a dose-titration of DF hIL-12-Fc-si, having LALAPA or LALAPG mutations. After 2-day stimulation, supernatants were harvested and IFNγ content measured by ELISA. For determining FcγR-binding activities, fluorophore-conjugated hIgG1 isotype antibody (83 nM) bound to THP-1 cells that express high affinity FcγRs CD32 and CD64 was detected by flow cytometry.

[0610] As shown in FIG. 31A, hIL-12-Fc-LALAPA and hIL-12-Fc-LALAPG have similar abilities to stimulate IFNγ production from PBMCs concurrently with PHA, well above the amount produced with PHA alone.

[0611] As shown in FIG. 31B, Simultaneous inclusion of 16-fold molar excess of hIL-12-Fc-wt (1.3 μM) in a mixture with the labeled hIgG1 isotype antibody resulted in substantial reduction of binding signal, likely due to competition for IgG1 binding to CD32 and CD64. In contrast, at the same concentration, neither incubation with hIL-12-Fc-LALAPA nor hIL-12-Fc-LALAPG resulted in detectable IgG1 isotype binding, suggesting abrogated FcγR engagement for both proteins attributable to the LALAPA and LALAPG mutations.

### Example 22: Manufacturing Process and Process Controls for DF hIL12-Fc Si

[0612] DF hIL12-Fc si is expressed in Chinese Hamster Ovary (CHO) cells in a suspension culture. Cells from the Master Cell Bank (MCB) are used to inoculate shake flasks containing chemically defined medium free of animal components. The cells are then used to inoculate progressively larger volume cultures to expand the cell number to enable inoculation of the production bioreactor.

[0613] The production bioreactor is operated in fed-batch mode to increase expression of the DF hIL12-Fc si protein. After approximately 14 days, the culture is harvested by depth filtration to remove cells and cell debris prior to initial purification. DF hIL12-Fc si is purified from the CHO harvest medium using a series of chromatography and filtration steps, including Protein A capture chromatography, Mixed Mode chromatography and Cation exchange chromatography (CEX).

[0614] Two dedicated, orthogonal viral inactivation and removal steps are included—low pH inactivation and nanofiltration. The viral inactivation step included addition of acetate to the filtered DF hIL12-Fc si solution to adjust the pH to about 3.65, and incubating for at least 60 minutes.

[0615] Finally, DF hIL12-Fc si is concentrated and formulated in a final composition of 20 mM Citrate, 6% Sucrose, 1% Mannitol and 0.01% (w/v) polysorbate 80. The formulated drug substance is then filtered through a 0.2 μm membrane into polycarbonate bottles prior to storage at ≤−65° C. A schematic of the entire DF hIL12-Fc si drug substance manufacturing process is provided in FIG. 32.

### Batch Scale and Definition

[0616] A single vial of DF hIL12-Fc si MCB is expanded to one production bioreactor and each harvest is purified into one lot of drug substance.

### Cell Culture and Upstream Manufacturing Process

[0617] The upstream drug substance manufacturing process for DF hIL12-Fc si is shown in FIG. 33 and additional details for each unit operation are provided.

### Shake Flask Passages

[0618] A vial of the master cell bank is thawed in a 37° C. water bath and the contents are slowly mixed by pipette and then added to a 125 mL shake flask containing pre-equilibrated growth medium (BalanCD CHO Growth Medium A, Irvine Scientific) supplemented with 6 mM L-glutamine. A cell count is taken after inoculation, and if necessary, the cell density is diluted to a target of 0.30×10⁶ to 0.50×10⁶ viable cells/mL. The flask is then placed on an orbital shaker in an incubator with temperature and % C02 (g) control. Cell density and viability are checked on day 3 prior to Passage 2.

[0619] For Passage 2, a 500 mL shake flask is pre-equilibrated with growth medium supplemented with 6 mM L-glutamine. The flask is then inoculated with cells from Passage 1 and placed on an orbital shaker in an incubator with temperature and % CO₂ (g) control. Cell density and viability are measured, and the cells are used to inoculate Passage 3 once the forward processing criteria are met.

[0620] For Passage 3, three 1000 mL shake flasks are pre-equilibrated with growth medium supplemented with 6 mM L-glutamine. The flasks are then inoculated with cells from Passage 2 and then placed on an orbital shaker in an incubator with temperature and % CO₂ (g) control. Cell density and viability are measured, and the cells are used to inoculate Passage 4 once the forward processing criteria are met.

[0621] For Passage 4, four 5000 mL shake flasks are pre-equilibrated with growth medium supplemented with 6 mM L-glutamine. The flasks are then inoculated with cells from Passage 2 and then placed on an orbital shaker in an incubator with temperature and % CO₂ (g) control. Cell density and viability are measured, and the cells are used to inoculate the 50 L Wave bioreactor once the forward processing criteria are met. Process parameter ranges and in-process tests are summarized in Table 17.

TABLE 17
Shake Flask Passages-Process Parameters and In-Process Tests

| Unit Operation | Parameter Setpoints/Ranges | In-Process Tests |
|---|---|---|
| Passage #1: | 30 mL working volume; 36.5° C. | Viable cell density |
| 125 mL shake flask | 5% CO₂ (g); 120 rpm | Viability |
| Passage #2: | 150 mL working volume; 36.5° C. | Viable cell density |
| 500 mL shake flask | 5% CO₂ (g); 120 rpm | Viability |
| Passage #3: | 400 mL working volume; 36.5° C. | Viable cell density |
| 3 × 1000 mL shake flasks | 5% CO₂ (g); 120 rpm | Viability |
| Passage #4: | 1500 mL working volume; 36.5° C. | Viable cell density |
| 4 × 5000 mL shake flasks | 5% CO₂ (g); 120 rpm | Viability |

### Wave Bioreactor

[0622] A 50 L Wave Bioreactor™ platform (GE Healthcare LifeSciences) is setup and inoculated with growth medium (BalanCD CHO Growth Medium A, Irvine Scientific) supplemented with 6 mM L-glutamine. The media is pre-conditioned at 36.5° C. and 5% CO₂ (g) and then inoculated with culture from Passage 4. The bioreactor is sampled daily for cell density and viability, and the culture is used to inoculate the 200 L production bioreactor once the transfer cell density criteria is achieved. Metabolite concentrations (e.g, glucose and lactate) and pH are also monitored on a daily basis for information. Process parameter ranges and in-process tests are summarized in Table 18.

TABLE 18
Wave Bioreactor-Process Parameters and In-Process Tests

| Unit Operation | Parameter Setpoints/Ranges | In-Process Tests |
|---|---|---|
| Wave | 20 L working volume; | Viable cell density |
| Bioreactor | 36.5° C.; 5% CO₂ (g) | Viability |

### Production Bioreactor

[0623] A 200 L disposable bioreactor is setup and inoculated with growth medium supplemented with 6 mM L-glutamine. The media is pre-equilibrated at 37° C. and then inoculated with culture from the 50 L Wave Bioreactor. Initial inoculation volume is approximately 130 L and final culture volume is approximately 180 L. Dissolved oxygen is controlled with air and oxygen supplementation and pH is controlled with addition of carbon dioxide gas and/or sodium carbonate base. The production bioreactor is sampled daily for cell density and viability and once the viable cell density is ≥14×10⁶ viable cells/mL, the temperature setpoint is shifted from 37° C. to 33° C. and maintained at 33° C. until harvest criteria is met. The culture is harvested when the viability is ≤85% viability or day 14 of culture, whichever comes first. Metabolite concentrations (e.g., glucose and lactate) and DF hIL12-Fc si titer (starting on day 8) are monitored during the culture period.

[0624] Starting on day 3 of culture, concentrated nutrient feeds are added on a daily basis until day 13. In addition, a concentrated glucose solution is added as needed to maintain a minimum concentration of glucose in the bioreactor after feeding. Beginning on day 3, antifoam is added to the bioreactor each day to minimize foam build-up. On the day of harvest, samples of the bioreactor culture are taken for adventitious agent testing. Process parameter ranges and in-process tests are summarized in Table 19.

TABLE 19
Production Bioreactor-Process Parameters and In-Process Tests

| Unit Operation | Parameter Setpoints/Ranges | In-Process Tests |
|---|---|---|
| Production | 130 L initial working volume | Viable cell density |
| Bioreaction | 36.5 ± 0.5° C. (prior to temp shift) | Viability |
| | 6.75 − 7.05 pH (prior to temp shift) | Mycoplasma |
| | 33.0 ± 0.5° C. (after temp shift) | Non-host contamination |
| | 6.80 − 7.20 pH (after temp shift) | Mouse minute virus by qPCR |
| | 40% dissolved oxygen | In vitro adventitious agents |
| | | Transmission electron microscopy |
| | | DF hIL12-Fc si titer |

### Harvest Clarification

[0625] The bioreactor is clarified by depth filtration to remove cells and cell debris in preparation for further purification steps. A two-stage single-use depth filtration system consisting of DOHC and XOHC filters is used for clarification. Prior to the start of filtration, the bioreactor temperature is adjusted to 18° C. and the dissolved oxygen setpoint is increased to 70% of saturation.

[0626] The harvest filters are rinsed with water for injection (WFI) and then equilibrated with buffer. The cell suspension is passed through the harvest filters using a peristaltic pump and the filters are flushed to collect the product. Pressure is monitored and maintained at ≤15 psig. The filtrate is then filtered through a 0.45/0.2 μm membrane into a sterile bag. Process parameter ranges and in-process tests are summarized in Table 20.

[0627] Clarified harvest is stored at 2-8° C. prior to the capture chromatography step unless processed immediately.

TABLE 20
Harvest Clarification-Process Parameters
and In-Process Tests

| | Parameter | |
|---|---|---|
| Unit Operation | Setpoints/Ranges | In-Process Tests |
| Clarification | ≤25 psig | DF hIL12-Fc si |
| | | concentration |
| | | by Protein A |
| | | HPLC Bioburden; |
| | | Endotoxin |

### Downstream Purification Manufacturing Process

[0628] The downstream drug substance manufacturing process for DF hIL12-Fc si is shown in FIG. 32 and additional details for each unit operation are provided in the text below. Downstream purification consists of three chromatography steps and two dedicated virus clearance steps, low pH inactivation and nanofiltration. For each process intermediate, hold-time studies have been performed to established allowed hold times and temperatures.

### Protein A Capture Chromatography

[0629] The clarified harvest is captured with Amsphere 3 Protein A (JSR Life Sciences) resin to remove process-related impurities (e.g., DNA and host cell proteins), media additives and serves as a volume reduction step prior to subsequent purification. Multiple cycles are performed for each lot as needed. Prior to each load, the resin is first equilibrated with 20 mM Tris, 150 mM NaCl, pH 7.5. Following loading, the column is washed with equilibration buffer to remove unbound or loosely bound impurities, and then a second wash with 50 mM acetate, pH 5.4 is performed to lower the pH and prepare the column for elution. DF hIL12-Fc si is eluted with 50 mM acetate, 100 mM arginine, pH 3.7 and collected by 280 nm UV wavelength starting at 1.25 AU/cm ascending and then ending at 1.25 AU/cm descending. The eluate is collected in one pool and each column cycle is individually processed by low pH virus inactivation. Process parameter ranges and in-process tests are summarized in Table 21.

TABLE 21
Protein A Capture Chromatography-Process
Parameters and In-Process Tests

| | Parameter Targets/ | In-Process |
|---|---|---|
| Unit Operation | Ranges | Tests |
| Protein A Capture | 20-33 g/L resin; | Bioburden |
| Chromatography | 15-25° C.; | Endotoxin |
| | Equilibration | |
| | pH: 7.5; Elution pH: 3.7; | |
| | Load/Wash/Elution | |
| | flow rate: 180 cm/hr | |

### Low pH Virus Inactivation

[0630] The protein A eluate is incubated at low pH to inactivate potentially present viruses. The pH of the capture eluate is adjusted with 0.5 M acetic acid as necessary and incubated for a minimum of 60 minutes. After the end of the incubation period, the inactivated pools are neutralized with 2 M Tris base and the material is passed through a 0.2 μm filtration assembly. Process parameter ranges and in-process tests are summarized in Table 22.

TABLE 22
Low pH Virus Inactivation-Process
Parameters and In-Process Tests

| | Parameter Targets/ | In-Process |
|---|---|---|
| Unit Operation | Ranges | Tests |
| Low pH viral | Acidification pH: | Bioburden |
| inactivation | 3.65 ± 0.05 pH | Endotoxin |
| | 60-75 minutes | |
| | Neutralization pH: | |
| | 5.2 ± 0.1; 15-25° C. | |

### X0SP Depth Filtration

[0631] The Virus Inactivated Neutralized (VIN) pool is processed through the X0SP intermediate depth filter to remove process related impurities (e.g., host cell proteins (HCP), host cell DNA). The system is flushed with WFI prior to loading DF hIL12-Fc si within the range of 500-1000 g/m². Following loading, the system is chased with 50 mM Acetate, pH 5.2 to complete product hold-up recovery. The X0SP pool conductivity is subsequently adjusted to ≤6.0 mS/cm with 50 mM Acetate pH 5.2 prior to loading onto the first chromatography step. Process parameter ranges and in-process tests are summarized in Table 23.

TABLE 23
X0SP Depth Filtration

| | Parameter Targets/ | In-Process |
|---|---|---|
| Unit Operation | Ranges | Tests |
| X0SP Depth | 500-1000 g/m2; ≤30 psig; | Bioburden |
| Filtration | 15-25° C. | Endotoxin |
| | Conductivity Adjustment: | |
| | ≤6.0 mS/cm | |

### Mixed Mode Chromatography

[0632] Mixed Mode chromatography by CaptoAdhere ImpRes (GE Healthcare) is performed in bind-elute mode to remove high molecular weight (HMW) species. The X0SP filtrate conductivity is adjusted to ≤6.0 mS/cm with 50 mM Acetate pH 5.2 as described above and split into multiple load cycles as needed. Prior to loading, the column is equilibrated with 50 mM Acetate pH 5.2 and loaded. After loading, the column is washed with 50 mM Acetate pH 5.2 and then eluted with 50 mM Acetate 250 mM NaCl pH 5.2. Collection is initiated by 280 nm UV detection at 0.625 AU/cm ascending and ended at 1.50 AU/cm descending. Following collection, each cycle is passed through a filter train containing a terminal 0.2 μm filter. Process parameter ranges and in-process tests are summarized in Table 24.

TABLE 24
Mixed Mode Chromatography-Process
Parameters and In-Process Tests

| | Parameter Targets/ | In-Process |
|---|---|---|
| Unit Operation | Ranges | Tests |
| Mixed Mode | Load conductivity: | Bioburden |
| Chromatography | 3.0-6.0 mS/cm; Load | Endotoxin |
| | pH: 5.1-5.3; Flow rate: | |
| | 150 cm/hr 15-23.5 g/L | |
| | resin load 15-25° C. | |

### Cation Exchange Chromatography

[0633] Cation exchange chromatography with Eshmuno CPX resin (EMD Millipore) is performed to remove product-related impurities (e.g., high molecular weight species, low molecular weight species), as well as additional process related impurity clearance. Multiple cycles are performed for each lot as needed. Prior to loading, the CaptoAdhere ImpRes cycles are pooled and dilute with 50 mM Tris, pH 7.4 buffer and pH adjusted to 7.50±0.20 with 2M Tris Base. The column is equilibrated with 50 mM Tris, pH 7.4 prior to loading the diluted and pH adjusted CaptoAdhere ImpRes pool. The column is then washed with 50 mM Tris, pH 7.4, and then eluted with a gradient of 50 mM Tris, pH 7.4 (Buffer A) and 50 mM Tris, 0.5 M NaCl, pH 7.4 (Buffer B).

[0634] Product collection is initiated by 280 nm UV detection starting at 2.5 AU/cm ascending and ending at 4.5 AU/cm descending. Following collection, each cycle is passed through a filter train containing a terminal 0.2 μm filter. Process parameter ranges and in-process tests are summarized in Table 25. PGP-51J1

TABLE 25
Eshmuno CPX-Process Parameters and In-Process Tests

| Unit Operation | Parameter Targets/Ranges | In-Process Tests |
|---|---|---|
| Cation Exchange | 10-14 g/L resin; Load pH: | Bioburden |
| | 7.50 ± 0.20; | |
| Chromatography | Load/Elution flow rate: | Endotoxin |
| | 200 cm/h 15-25° C. | |

### Nanofiltration

[0635] Nanofiltration is performed to remove any potentially present viruses based on size. The Eshmuno CPX eluate is passed through a prefilter (Viresolve Prefilter Pod, EMD Millipore) and then through a 20 nm nominal filter (Viresolve Pro Modus, EMD Millipore). Prior to loading, the system is flushed with WFI and equilibrated with 50 mM Tris, 265 mM NaCl, pH 7.4. After loading, the system is rinsed with equilibration buffer to recover the system hold-up. The filtrate is then passed through a 0.2 μm membrane prior to the next step. Process parameter ranges and in-process tests are summarized in Table 26.

TABLE 26
Nanofiltration-Process Parameters and In-Process Tests

| Unit Operation | Parameter Targets/Ranges | In-Process Tests |
|---|---|---|
| Nanofiltration | ≤500 L/m² load | Bioburden |
| | ≤30 psig | Endotoxin |
| | 15-25° C. | Filter integrity test |

### Ultrafiltration and Diafiltration (UF/DF)

[0636] Ultrafiltration and diafiltration are performed using Pellicon Ultracel D Screen regenerated cellulose 30 kDa molecular weight cut-off membranes. This step concentrates and exchange the DF hIL12-Fc si into the final formulation buffer at the intended concentration prior to final filtration and bottling. The system is first equilibrated with 50 mM Tris, 265 mM NaCl, pH 7.4 and then the viral filtrate pool is concentrated to a target of 5.0 g/L. Buffer exchange is then performed against a minimum of 7 diavolumes of 20 mM Citrate, pH 6.5. Following diafiltration, a second concentration is performed targeting 11.0 g/L and then the product is diluted to a final retentate target concentration of 7.5 g/L with diafiltration buffer.

[0637] A 20 mM Citrate, 18% (w/v) Sucrose, 3% (w/v) Mannitol, 0.03% (w/v) polysorbate-80, pH 6.5 stock solution is spiked into the UF/DF pool to target a final concentration of 20 mM Citrate, 6% (w/v) Sucrose, 1% (w/v) Mannitol, 0.01% (w/v) polysorbate-80 in the drug substance. Process parameter ranges and in-process tests are summarized in Table 27.

TABLE 27
UF/DF-Process Parameters and In-Process Tests

| Unit Operation | Parameter Targets/Ranges | In-Process Tests |
|---|---|---|
| Ultrafiltration | ≤250 g/m² load; | Bioburden |
| and | 12.0-18.0 psig | Endotoxin |
| Diafiltration | transmembrane pressure | DF hIL12-Fc si |
| | 7-9 diavolumes; 15-25° C. | Concentration |

### Filtration, Bottling, and Storage of Bulk Drug Substance

[0638] The formulated UF/DF retentate is filtered through a 0.2 μm membrane into the final drug substance storage containers, 2 L polycarbonate bottles with a polypropylene closures (Nalgene Biotainer). Filtration is performed in an ISO 5/Grade A area. Following filtration, each bottle is aseptically sampled, labeled and frozen at ≤−65° C. Process parameter ranges and in-process tests are summarized in Table 28.

TABLE 28
Filtration, Bottling, and BDS Storage-Process
Parameters and In-Process Tests

| Unit Operation | Parameter Targets/Ranges | In-Process Tests |
|---|---|---|
| Filtration, Bottling, | 1.0 L fill volume Storage | Filter integrity |
| and BDS Storage | at ≤ −65° C. | testing |

### Example 23: Formulation, Packaging, and Storage of DF hIL12-Fc Si

[0639] The DF hIL12-Fc si drug product manufacturing process flow diagram, indicating manufacturing steps and in-process controls (IPCs), is shown in FIG. 32. Filtration and filling are performed following aseptic procedures that meet applicable standards described in ICH guidelines and current Good Manufacturing Practices.

### Thawing Bulk Drug Substance

[0640] The DF hIL12-Fc si Drug Substance (DS) is thawed for ≤96 hours at 2-8° C. in the dark. Complete thawing of DS is confirmed by visual examination of the bottle(s).

### Dilution to 80% of Target Batch Volume

[0641] A buffer consisting of 20 mM citrate, 6% (w/v) sucrose, 1% (w/v) mannitol, 0.01% polysorbate 80 (w/v), pH 6.0 is prepared in a 10 L glass carboy. Solid sodium citrate dihydrate, citric acid monohydrate, sucrose, and mannitol are weighed, added to WFI, and mixed to dissolution. A polysorbate 80 stock solution is prepared in WFI and added to the buffer. The pH of the buffer is tested (acceptance criteria 6.5±0.4). The buffer is diluted with WFI to the target volume, mixed, tested to confirm the pH (6.5±0.4) and osmolality, and filtered through a 0.2 μm membrane.

[0642] The weight of drug substance is used to calculate a target batch volume. The drug substance is added to buffer in a clean, 10 L glass carboy to approximately 80% of the calculated batch volume and mixed. The 80% drug product solution is tested for pH (acceptance criteria 6.5±0.3) and protein concentration by absorbance at 280 nm using an Extinction coefficient of 1.44 L/(g*cm).

[0643] The buffer components are designed to yield a pH of 6.5. If the pH does not meet acceptance criteria at either the buffer or 80% bulk drug product steps, a titration with 1N sodium hydroxide or 1N hydrochloric acid may be performed to bring the pH within the acceptance criteria.

Dilution of DF hIL12-Fc si to 1 mg mL

[0644] The protein concentration result from the previous step is used to calculate the required amount of buffer to reach a DF HIL12-FC SI concentration of 1 mg/mL. The concentration is verified by absorbance at 280 nm (acceptance criteria 1.0±0.2 mg/mL), and samples are taken to confirm the pH (acceptance criteria 6.5±0.3) and osmolality.

[0645] The compounded bulk drug product solution is passed through a sterile 0.2 μm filter into a clean, 10 L glass carboy for bioburden reduction, and held until sterile filtration and filling. Samples for pre-filtration bioburden are removed from the 10 L glass carboy.

### Sterile Filtration

[0646] The bulk drug product is filtered through two filter capsules in series, each filter capsule consisting of a 0.45 μm polyethersulfone (PES) pre-filter membrane and a 0.2 μm PES sterilizing membrane. The drug product is filtered into a sterile, disposable fill bag inside a controlled Grade B area of the filling suite. Both sterilizing filter capsules are tested for integrity by bubble point after filtration (acceptance criteria ≥3200 mbar, using WFI).

Filling into Vials

[0647] The bulk drug product solution is filled from the disposable bag residing immediately outside of the restricted access barrier system (RABS). The product is filled into ready-to-use 2R borosilicate type I vials inside the controlled, Grade A RABS area of the filling suite.

[0648] The vials are stoppered with sterilized, 13 mm serum stoppers and capped with 13 mm aluminum overseals. Fill volume of the vials is verified by weight checks of 100% of the batch during filling operations (acceptance criteria 1.3 mL+5%). After filling, vials are moved to 2-8° C. storage.

### Visual Inspection, Packaging and Storage

[0649] The filled vials undergo 100% manual visual inspection for container, closure, and product defects, followed by an Acceptance Quality Limit inspection (AQL). The inspected vials are bulk packaged and stored at 2-8° C. prior to shipment.

### Example 24: Formulation Analysis

### Buffer Analysis

[0650] The formulations listed in Table 29 were evaluated to assess the effects of various buffer and pH conditions on the stability of DF hIL12-Fc si. DF hIL12-Fc si was buffer exchanged using centrifugal ultrafiltration devices (Amicon Ultra-4 30 k MWCO) into the buffers listed in Table 29 to a target protein concentration of 1 mg/mL. Following the final buffer-exchange, the protein concentration was measured using UV-Visible spectroscopy with the sponsor-provided extinction coefficient (1.43 mL/cm*mg). The samples were then split into three equal sized aliquots. One aliquot was stored at 2-8° C. and the other two were stored at 50° C. The aliquot stored at a 2-8° C. and one of the aliquots at 50° C. were both removed at 1 week for testing as listed in Table 30. The other vial at 50° C. was removed after 2 weeks and stored at −75° C.

TABLE 29
Buffers screened for DF hIL12-Fc si preformulation

| Buffer | pH |
|---|---|
| Succinate (20 mM) | 5.5 |
| pKa = 5.64 | 6.5 |
| Citrate (20 mM) | 5.5 |
| pKa = 6.4 | 6.0 |
| | 7.0 |
| Histidine (20 mM) | 6.5 |
| pKa = 6.04 | 7.0 |
| Phosphate (20 mM) | 6.5 |
| pKa = 7.2 | 7.0 |
| | 7.5 |
| Tris (20 mM) | 7.5 |
| pKa = 8.1 | 8.0 |

TABLE 30
Assay panel

| Test Panel | Assay Volume (μL) |
|---|---|
| Visual Appearance | In Vial |
| DSF | 100 |
| A₂₈₀ | 100 |
| DLS | 100 |
| SEC-HPLC | 100 |
| ATM-2606 | |
| CE (reduced) | 100 |
| ATM-2747 | |

### Results

[0651] Samples of DF hIL12-Fc si were buffer exchanged into 12 buffer/pH conditions. The pH and concentration of the samples were immediately assessed. After which, the samples were aliquoted and stored at 2-8° C. and 50° C. After a one-week incubation, the samples were then assessed per the assay panel in Table 30. The results are shown below, and in FIGS. 34A-42B.

TABLE 31
Concentration of DF hIL12-Fc si (buffer exchange)

| Buffer | Target pH | Concentration (mg/mL) |
|---|---|---|
| Succinate (20 mM) | 5.5 | 1.08 |
| pKa = 5.64 | 6.5 | 1.07 |
| Citrate (20 mM) | 5.5 | 1.09 |
| pKa = 6.4 | 6.0 | 1.09 |
| | 7.0 | 1.09 |
| Histidine (20 mM) | 6.5 | 1.08 |
| pKa = 6.04 | 7.0 | 1.11 |
| Phosphate (20 mM) | 6.5 | 1.05 |
| pKa = 7.2 | 7.0 | 1.09 |
| | 7.5 | 1.07 |
| Tris (20 mM) | 7.5 | 1.12 |
| pKa = 8.1 | 8.0 | 1.15 |

Please note:
concentration = ((A₂₈₀-A₃₂₀)/1.43)*1.0 (cm path length) *
Dilution Factor (if applicable)

TABLE 32
pH values (buffer exchange)

| Buffer | Target pH | Buffer pH | Sample pH |
|---|---|---|---|
| Succinate (20 mM) | 5.5 | 5.4 | 5.4 |
| pKa = 5.64 | 6.5 | 6.4 | 6.5 |
| Citrate (20 mM) | 5.5 | 5.5 | 5.5 |
| pKa = 6.4 | 6.0 | 5.9 | 5.9 |
| | 7.0 | 6.9 | 7.0 |
| Histidine (20 mM) | 6.5 | 6.4 | 6.4 |
| pKa = 6.04 | 7.0 | 6.9 | 6.8 |
| Phosphate (20 mM) | 6.5 | 6.5 | 6.5 |
| pKa = 7.2 | 7.0 | 6.9 | 7.0 |
| | 7.5 | 7.5 | 7.4 |
| Tris (20 mM) | 7.5 | 7.4 | 7.4 |
| pKa = 8.1 | 8.0 | 7.9 | 7.9 |

### Visual Appearance (1-Week Incubation)

[0652] Visual appearances of all samples were assessed 1 week after incubating the samples at 5° C. or at 50° C. All samples were colorless, clear liquids, free of visible particulates (see FIGS. 35A-35B).

### Differential Scanning Fluorimetry (DSF) (1-Week Incubation)

[0653] The DSF experiments were preformed using an Unchained Labs UNcle. Samples were evaluated for their thermal stability. DF hIL12-Fc si thermal unfolding (Tₘ) and onset of aggregation (T_{agg}) were monitored by evaluating changes in intrinsic protein fluorescence and static light scattering (SLS at 266 nm), respectively, as a function of temperature. Samples were evaluated in triplicate, and the triplicate results were averaged. Samples were analyzed over a temperature ramp of 25° C.-95° C. at a constant linear ramp rate of 0.5° C./min. See Tables 33-36, below, and FIGS. 36A-37D.

TABLE 33
Determined DSF Tₘ Temperatures
(1-week incubation at 5° C.)

| | | Average | Average | Average |
|---|---|---|---|---|
| Buffer | pH | Tₘ₁ (° C.) | Tₘ₂ (° C.) | Tₘ₃ (° C.) |
| Succinate (20 mM) | 5.5 | 61.0 | 76.7 | 85.8 |
| pKa = 5.64 | 6.5 | 64.4 | 75.9 | N/A |
| Citrate (20 mM) | 5.5 | 62.0 | 78.6 | N/A |
| pKa = 6.4 | 6.0 | 64.6 | 75.7 | N/A |
| | 7.0 | 65.8 | 74.7 | N/A |
| Histidine (20 mM) | 6.5 | 61.3 | 76.5 | N/A |
| pKa = 6.04 | 7.0 | 61.3 | 78.8 | N/A |
| Phosphate (20 mM) | 6.5 | 64.0¹ | 76.8¹ | N/A¹ |
| pKa = 7.2 | 7.0 | 65.1 | 76.0 | N/A |
| | 7.5 | 64.8 | 75.4 | N/A |
| Tris (20 mM) | 7.5 | 62.9 | 75.0 | 80.6 |
| pKa = 8.1 | 8.0 | 62.2 | 76.8 | N/A |

¹One of the triplicate wells was excluded from analysis. A low intensity reading occurred around Tₘ₁, negatively affecting the differential and preventing proper analysis of Tₘ₁.

TABLE 34
Determined DSF Tₘ Temperatures (1-week incubation at 50° C.)

| | | Average | Average | Average |
|---|---|---|---|---|
| Buffer | pH | Tₘ₁ (° C.) | Tₘ₂ (° C.) | Tₘ₃ (° C.) |
| Succinate (20 mM) | 5.5 | 63.0 | 83.3 | N/A |
| pKa = 5.64 | 6.5 | 65.1 | 76.7 | N/A |
| Citrate (20 mM) | 5.5 | 63.0 | 79.1 | N/A |
| pKa =6.4 | 6.0 | 65.0¹ | 76.5¹ | N/A¹ |
| | 7.0 | 66.4 | 75.5 | N/A |
| Histidine (20 mM) | 6.5 | 62.8 | 77.3 | N/A |
| pKa = 6.04 | 7.0 | 62.4 | 80.5² | N/A¹ |
| Phosphate (20 mM) | 6.5 | 64.8 | 77.5 | N/A |
| pKa = 7.2 | 7.0 | 65.5 | 76.4 | N/A |
| | 7.5 | 64.9 | 75.1 | N/A |
| Tris (20 mM) | 7.5 | 63.9 | 76.0 | 83.4 |
| pKa = 8.1 | 8.0 | 62.4 | 76.8 | N/A |

¹One of the triplicate wells was excluded from analysis. Data acquired for this well was indicative of either an air bubble or misread, preventing proper analysis.
²An additional Tₘ (67.4° C.) was identified between Tₘ₁ and Tₘ₂. The Tm was not reported as Tₘ₂ given its low temperature as well as poor differential and separation from Tₘ₁.

TABLE 35
Determined DSF T_{agg} 266 Temperatures
(1-week incubation at 5° C.)

| | | T_{agg} 266(° C.) |
|---|---|---|
| Buffer | pH | Average |
| Succinate (20 mM) | 5.5 | 70.7 |
| pKa = 5.64 | 6.5 | 75.3 |
| Citrate (20 mM) | 5.5 | 72.9 |
| pKa = 6.4 | 6.0 | 76.1 |
| | 7.0 | 63.9 |
| Histidine (20 mM) | 6.5 | 65.4 |
| pKa = 6.04 | 7.0 | 70.1 |
| Phosphate (20 mM) | 6.5 | 75.8 |
| pKa = 7.2 | 7.0 | 63.7 |
| | 7.5 | 63.2 |
| Tris (20 mM) | 7.5 | 74.8 |
| pKa = 8.1 | 8.0 | 63.4 |

TABLE 36
Determined DSF T_{agg} 266 Temperatures
(1-week incubation at 50° C.)

| Buffer | pH | T_{agg} 266(° C.) Average |
|---|---|---|
| Succinate (20 mM) | 5.5 | 64.7 |
| pKa = 5.64 | 6.5 | 74.9 |
| Citrate (20 mM) | 5.5 | 70.1 |
| pKa = 6.4 | 6.0 | 76.7 |
| | 7.0 | 63.3 |
| Histidine (20 mM) | 6.5 | 62.2 |
| pKa = 6.04 | 7.0 | 71.5 |
| Phosphate (20 mM) | 6.5 | 76.0 |
| pKa = 7.2 | 7.0 | 63.4 |
| | 7.5 | 61.8 |
| Tris (20 mM) | 7.5 | 75.8 |
| pKa = 8.1 | 8.0 | 63.1 |

Concentrations of DF hIL12-Fc si and pH were assessed in the various buffer formulations after 1 week of incubation at 5° C. and 50° C. See Tables 37-40 and FIGS. 38A-39B.

TABLE 37
Concentration of DF hIL12-Fc si (1-week incubation at 5° C.)

| Buffer | Target pH | Concentration (mg/mL) |
|---|---|---|
| Succinate (20 mM) | 5.5 | 0.80 |
| pKa = 5.64 | 6.5 | 0.83 |
| Citrate (20 mM) | 5.5 | 0.92 |
| pKa =6.4 | 6.0 | 0.92 |
| | 7.0 | 0.89 |
| Histidine (20 mM) | 6.5 | 0.89 |
| pKa = 6.04 | 7.0 | 0.97 |
| Phosphate (20 mM) | 6.5 | 0.91 |
| | 7.0 | 0.89 |
| pKa = 7.2 | 7.5 | 0.96 |
| Tris (20 mM) | 7.5 | 0.96 |
| pKa = 8.1 | 8.0 | 1.02 |

Please note:
concentration = ((A₂₈₀-A₃₂₀)/1.43)*1.0 (cm path length) * Dilution Factor (if applicable)

TABLE 38
Concentration of DF hIL12-Fc si (1-week incubation at 50° C.)

| Buffer | Target pH | Concentration (mg/mL) |
|---|---|---|
| Succinate (20 mM) | 5.5 | 0.91 |
| pKa = 5.64 | 6.5 | 0.93 |
| Citrate (20 mM) | 5.5 | 0.97 |
| pKa =6.4 | 6.0 | 0.98 |
| | 7.0 | 0.96 |
| Histidine (20 mM) | 6.5 | 0.90 |
| pKa = 6.04 | 7.0 | 1.01 |
| Phosphate (20 mM) | 6.5 | 0.91 |
| pKa =7.2 | 7.0 | 0.98 |
| | 7.5 | 1.01 |
| Tris (20 mM) | 7.5 | 1.00 |
| pKa = 8.1 | 8.0 | 1.06 |

Please note:
concentration = ((A₂₈₀-A₃₂₀)/1.43)*1.0 (cm path length) * Dilution Factor (if applicable)

TABLE 39
pH values (1-week incubation at 5° C.)

| Buffer | Target pH | Buffer pH | Sample pH |
|---|---|---|---|
| Succinate (20 mM) | 5.5 | 5.4 | 5.4 |
| pKa = 5.64 | 6.5 | 6.4 | 6.5 |
| Citrate (20 mM) | 5.5 | 5.5 | 5.6 |
| pKa = 6.4 | 6.0 | 5.9 | 6.0 |
| | 7.0 | 6.9 | 7.1 |
| Histidine (20 mM) | 6.5 | 6.4 | 6.5 |
| pKa = 6.04 | 7.0 | 6.9 | 6.9 |
| Phosphate (20 mM) | 6.5 | 6.5 | 6.5 |
| pKa = 7.2 | 7.0 | 6.9 | 7.0 |
| | 7.5 | 7.5 | 7.5 |
| Tris (20 mM) | 7.5 | 7.4 | 7.4 |
| pKa = 8.1 | 8.0 | 7.9 | 8.0 |

TABLE 40
pH values (1-week incubation at 50° C.)

| Buffer | Target pH | Buffer pH | Sample pH |
|---|---|---|---|
| Succinate (20 mM) | 5.5 | 5.4 | 5.5 |
| pKa = 5.64 | 6.5 | 6.4 | 6.6 |
| Citrate (20 mM) | 5.5 | 5.5 | 5.6 |
| pKa = 6.4 | 6.0 | 5.9 | 6.0 |
| | 7.0 | 6.9 | 7.1 |
| Histidine (20 mM) | 6.5 | 6.4 | 6.5 |
| pKa = 6.04 | 7.0 | 6.9 | 7.0 |
| Phosphate (20 mM) | 6.5 | 6.5 | 6.5 |
| pKa = 7.2 | 7.0 | 6.9 | 7.0 |
| | 7.5 | 7.5 | 7.5 |
| Tris (20 mM) | 7.5 | 7.4 | 7.5 |
| pKa = 8.1 | 8.0 | 7.9 | 8.0 |

### Dynamic Light Scattering (DLS) (1-Week Incubation)

[0654] The DLS experiments were performed using a Malvern Zeta sizer. For each sample measurement, five consecutive scans were acquired at 25° C. The Z-average hydrodynamic diameter and polydispersity index (PDI) were determined from the cumulants analysis and the Stokes Einstein equation. Polydispersity is a measurement of non-uniformity in a sample. If particles are not uniform in size, a higher polydispersity will be measured. A low polydispersity index (PDI) (≤0.200) indicates greater uniformity in the size of the particle. See Tables 41-42 and FIGS. 40A-40L.

TABLE 41
Determined DLS Sizes (1-week incubation at 5° C.)

| | | Average | | Monomer | |
|---|---|---|---|---|---|
| | | Size | | Size | Monomer % |
| Buffer | pH | (d · nm) | PdI | (d · nm) | Pd |
| Succinate (20 mM) | 5.5 | 13.71 | 0.16 | 15.33 | 37.70 |
| pKa = 5.64 | 6.5 | 13.55 | 0.20 | 15.35 | 42.60 |
| Citrate (20 mM) | 5.5 | 18.94 | 0.20 | 22.52 | 47.10 |
| pKa = 6.4 | 6.0 | 11.22 | 0.07 | 12.17 | 28.80 |
| | 7.0 | 11.62 | 0.17 | 12.93 | 35.20 |
| Histidine (20 mM) | 6.5 | 15.98 | 0.10 | 17.75 | 33.00 |
| pKa = 6.04 | 7.0 | 14.88 | 0.06 | 15.92 | 26.90 |
| Phosphate (20 mM) | 6.5 | 13.38 | 0.17 | 14.81 | 36.50 |
| pKa = 7.2 | 7.0 | 14.66 | 0.25 | 16.00 | 43.50 |
| | 7.5 | 21.24 | 0.36 | 18.42 | 29.40 |
| Tris (20 mM) | 7.5 | 85.19 | 0.15 | 20.42 | 27.10 |
| pKa = 8.1 | 8.0 | 13.41 | 0.14 | 15.01 | 36.00 |

TABLE 42
Determined DLS Sizes (1-week incubation at 50° C.)

| | | Average | | Monomer | |
|---|---|---|---|---|---|
| | | Size | | Size | Monomer % |
| Buffer | pH | (d · nm) | PdI | (d · nm) | Pd |
| Succinate (20 mM) | 5.5 | 63.12 | 0.21 | 80.95 | 50.20 |
| pKa = 5.64 | 6.5 | 14.46 | 0.12 | 15.76 | 30.10 |
| Citrate (20 mM) | 5.5 | 44.20 | 0.28 | 76.39 | 49.30 |
| pKa = 6.4 | 6.0 | 16.46 | 0.25 | 15.99 | 33.00 |
| | 7.0 | 14.31 | 0.25 | 14.13 | 28.90 |
| Histidine (20 mM) | 6.5 | 98.61 | 0.44 | 185.60 | 46.10 |
| pKa = 6.04 | 7.0 | 22.52 | 0.13 | 24.23 | 30.30 |
| Phosphate (20 mM) | 6.5 | 27.91 | 0.33 | 26.08 | 38.40 |
| pKa = 7.2 | 7.0 | 14.69 | 0.20 | 15.46 | 32.00 |
| | 7.5 | 12.06 | 0.11 | 13.39 | 33.50 |
| Tris (20 mM) | 7.5 | 16.22 | 0.16 | 17.20 | 31.00 |
| pKa = 8.1 | 8.0 | 17.42 | 0.25 | 17.25 | 32.50 |

### Size Exclusion Chromatography High-Performance Liquid Chromatography (SEC-HPLC)

[0655] The SEC experiments were performed using a TOSOH G3000SW×1 (7.8×300 mm). For each sample, 90 μL was injected to achieve a column load of 90 μg (target column load of 100 g was not achievable given the low concentration of 1 mg/mL). Given the lack of historic data, the largest peak was defined as the main peak. Peaks prior to the main peak were defined as high molecular weight (HMNW) species and peaks after as low molecular weight (LMW) species. See Tables 43-44 and FIG. 41. The purity of the main peak was greater than 93% for all of the conditions tested for the 5° C. one-week incubation.

TABLE 43
SEC-HPLC Purity (1-week incubation at 5° C.)

| | | % | % | % |
|---|---|---|---|---|
| Buffer | pH | HMW | Main | LMW |
| Succinate (20 mM) | 5.5 | 1.0 | 96.6 | 2.4 |
| pKa = 5.64 | 6.5 | 1.9 | 96.0 | 2.2 |
| Citrate (20 mM) | 5.5 | 1.1 | 97.0 | 1.9 |
| pKa = 6.4 | 6.0 | 0.4 | 96.7 | 2.8 |
| | 7.0 | 1.1 | 97.4 | 1.4 |
| Histidine (20 mM) | 6.5 | 3.9 | 93.7 | 2.4 |
| pKa = 6.04 | 7.0 | 2.0 | 96.5 | 1.5 |
| Phosphate (20 mM) | 6.5 | 1.4 | 97.4 | 1.2 |
| pKa = 7.2 | 7.0 | 1.4 | 95.2 | 3.5 |
| | 7.5 | 1.3 | 95.2 | 3.5 |
| Tris (20 mM) | 7.5 | 2.2 | 96.8 | 1.0 |
| pKa = 8.1 | 8.0 | 2.0 | 95.5 | 2.5 |

TABLE 44
SEC-HPLC Purity (1-week incubation at 50° C.)

| | | % | % | % |
|---|---|---|---|---|
| Buffer | pH | HMW | Main | LMW |
| Succinate (20 mM) | 5.5 | 46.9 | 51.0 | 2.1 |
| pKa = 5.64 | 6.5 | 11.4 | 86.9 | 1.7 |
| Citrate (20 mM) | 5.5 | 26.7 | 71.9 | 1.4 |
| pKa = 6.4 | 6.0 | 6.4 | 92.0 | 1.5 |
| | 7.0 | 4.2 | 94.3 | 1.5 |
| Histidine (20 mM) | 6.5 | 44.7 | 53.7 | 1.7 |
| pKa = 6.04 | 7.0 | 41.2 | 57.8 | 1.0 |
| Phosphate (20 mM) | 6.5 | 17.2 | 81.0 | 1.8 |
| pKa = 7.2 | 7.0 | 8.8 | 89.7 | 1.5 |
| | 7.5 | 8.8 | 89.4 | 1.8 |
| Tris (20 mM) | 7.5 | 21.2 | 77.4 | 1.4 |
| pKa = 8.1 | 8.0 | 22.0 | 76.6 | 1.4 |

### Capillary Electrophoresis Sodium Dodecyl Sulfate (CE-SDS) (Reduced)

[0656] The CE-SDS experiments were performed using a Beckman Coulter PA 800 plus Capillary Electrophoresis System. Given the lack of historic data, the largest peak was defined as the main peak (peak 7). Peaks prior to the main peak were defined as LMW species and peaks after as HMNW species. See Tables 45-46 and FIG. 42. The purity of the main peak was greater than 49% for all of the conditions tested for the 5° C. one-week incubation.

TABLE 45
CE-SDS Purity (1-week incubation at 5° C.)

| | | % Purity/Impurity | | | | | | | |
|---|---|---|---|---|---|---|---|---|---|
| Buffer | pH | Peak 1 | Peak 2 | Peak 3 | Peak 4 | Peak 5 | Peak 6 | Peak 7 | Peak 8 |
| Succinate (20 | 5.5 | 0.2 | 6.9 | 8.0 | 1.3 | 5.6 | 24.8 | 52.8 | 0.4 |
| mM) | 6.5 | 0.3 | 6.9 | 7.9 | 1.2 | 5.7 | 25.0 | 52.5 | 0.4 |
| pKa = 5.64 | | | | | | | | | |
| Citrate (20 mM) | 5.5 | 0.2 | 6.9 | 7.9 | 1.2 | 5.8 | 25.0 | 52.5 | 0.4 |
| pKa = 6.4 | 6.0 | 0.2 | 6.8 | 7.9 | 1.2 | 5.8 | 24.9 | 52.8 | 0.4 |
| | 7.0 | 0.2 | 6.8 | 7.8 | 1.2 | 5.7 | 24.8 | 53.1 | 0.4 |
| Histidine (20 mM) | 6.5 | 0.2 | 7.0 | 7.7 | 1.2 | 5.4 | 25.2 | 52.8 | 0.4 |
| pKa = 6.04 | 7.0 | 0.3 | 7.1 | 7.8 | 1.1 | 5.4 | 25.1 | 52.8 | 0.4 |
| Phosphate (20 | 6.5 | 2.2 | 8.5 | 10.1 | 1.0 | 5.2 | 22.9 | 49.1 | 0.4 |
| mM) | 7.0 | 0.3 | 7.0 | 7.7 | 1.1 | 5.5 | 25.3 | 52.7 | 0.4 |
| pKa = 7.2 | 7.5 | 0.3 | 7.0 | 7.8 | 1.2 | 5.7 | 24.9 | 52.8 | 0.4 |
| Tris (20 mM) | 7.5 | 0.3 | 7.0 | 7.9 | 1.2 | 5.5 | 25.1 | 52.6 | 0.5 |
| pKa = 8.1 | 8.0 | 0.3 | 7.0 | 7.9 | 1.3 | 5.5 | 24.6 | 52.0 | 0.9 |

TABLE 46
CE-SDS Purity (1-week incubation at 50° C.)

| | | % Purity/Impurity | | | | | | | |
|---|---|---|---|---|---|---|---|---|---|
| Buffer | pH | Peak 1 | Peak 2 | Peak 3 | Peak 4 | Peak 5 | Peak 6 | Peak 7 | Peak 8 |
| Succinate (20 | 5.5 | 1.4 | 5.7 | 10.1 | 1.7 | 6.8 | 24.5 | 46.7 | 1.6 |
| mM) | 6.5 | 0.6 | 7.4 | 8.6 | 1.4 | 5.6 | 24.4 | 51.3 | 0.7 |
| pKa = 5.64 | | | | | | | | | |
| Citrate (20 mM) | 5.5 | 1.0 | 5.9 | 9.5 | 1.5 | 6.5 | 25.8 | 49.1 | 0.4 |
| pKa = 6.4 | 6.0 | 0.5 | 7.0 | 8.4 | 1.5 | 5.8 | 25.1 | 51.1 | 0.5 |
| | 7.0 | 0.6 | 7.8 | 8.9 | 1.3 | 5.7 | 24.6 | 50.5 | 0.2 |
| Histidine (20 mM) | 6.5 | 0.6 | 6.2 | 7.9 | 1.4 | 5.7 | 24.9 | 50.4 | 1.7 |
| pKa = 6.04 | 7.0 | 0.7 | 7.0 | 8.6 | 1.5 | 5.4 | 24.5 | 49.5 | 1.6 |
| Phosphate (20 | 6.5 | 2.0 | 17.0 | 18.0 | 1.3 | 5.7 | 22.0 | 32.5 | 0.6 |
| mM) | 7.0 | 0.8 | 8.1 | 9.2 | 1.5 | 5.3 | 24.5 | 49.5 | 0.9 |
| pKa = 7.2 | 7.5 | 1.1 | 9.1 | 10.0 | 1.6 | 5.5 | 22.4 | 46.5 | 2.5 |
| Tris (20 mM) | 7.5 | 0.6 | 7.3 | 8.5 | 1.5 | 5.4 | 24 | 50.1 | 1.5 |
| pKa = 8.1 | 8.0 | 0.6 | 7.5 | 8.8 | 1.5 | 5.0 | 23.7 | 49.2 | 2.4 |

### Summary and Conclusions

[0657] All the samples were analyzed by visual appearance, pH, A₂₈₀, DLS, DSF, SEC, and CE-SDS. Evaluation by visual appearance and pH showed no significant differences between the various samples. The concentrations of all the samples were slightly decreased after the 1-week incubation (a decrease of 0.1 or 0.2 mg/mL). The concentration of the succinate samples (pH 5.5 and 6.5) after a 1-week incubation at 5° C. was more decreased (from 1.1 mg/mL to 0.8 mg/mL). The CE-SDS data showed minimal variation in the main peak purity (with the exception of the phosphate pH 6.5 buffer, which had a significantly lower mean peak purity after the 50° C. 1-week incubation).

[0658] The thermal stability data indicated that low pH (5.5) and histidine buffers negatively affected the molecule. Citrate buffers (with the exception of pH 5.5) and phosphate buffers displayed the highest thermal stability (for both the 5° C. and the 50° C. 1-week incubation samples).

[0659] The light scattering data after the 5° C. 1-week incubation indicated that the citrate buffer samples (with the exception of pH 5.5) had the smallest average size with low polydispersity. The phosphate and succinate buffers similarly had a small average size with low polydispersity. After the 50° C. 1-week incubation, the citrate buffers (with the exception of pH 5.5), the phosphate buffers (with the exception of pH 6.5), and the succinate pH 6.5 buffer, all had small average sizes.

[0660] The SEC data of the 5° C. 1-week incubation samples showed minimal variation in the main peak purity. The SEC data of the 50° C. 1-week incubation samples showed a greater degree of variation, ranging from 51.0% to 94.3%. The most desirable buffers were again the citrate buffers (with the exception of pH 5.5) and the phosphate buffers

[0661] Performance of the citrate pH 6.0 buffer or the citrate pH 7.0 buffer was more desirable than the alternative buffers tested in the assays described supra.

### Excipient Analysis

[0662] The formulations listed in Table 47 were evaluated to assess the effects of various excipients and surfactants on the stability of DF-hIL-12-Fc si when buffered in 20 mM Citrate, pH 6.5. DF-hIL-12-Fc si was buffer exchanged using centrifugal ultrafiltration devices (Amicon Ultra-15 30 k MWCO) into the buffers listed in Table 47 to a target protein concentration of either 1 mg/mL or 10 mg/mL. Following the final buffer-exchange, the protein concentration was measured using UV-Visible spectroscopy (UV-Vis) with the sponsor-provided extinction coefficient (1.43 mL/cm*mg). The samples were then sterile filtered using a 0.22 μm EMD Millipore Ultrafree-CL centrifugal filter devices with Durapore membrane (Fisher Scientific Cat. #UFC40GV0S). Following sterile filtration, each formulation was handled aseptically in a laminar flow hood. The formulated samples, as specified in Table 47, were either spiked with polysorbate 80 (PS80) to a final concentration of 0.01% or were not spiked with a surfactant. The samples were then split into six equal sized aliquots. Two aliquots were stored at 2-8° C., three were stored at 50° C., and the final aliquot underwent 5 freeze thaw cycles. For the freeze thaw aliquot, the samples were frozen at −75±10° C. for at least an hour and thawed at room temperature, with visual confirmation of no ice. Both aliquots stored at 2-8° C. were pulled at 2 weeks. One aliquot was used for testing and the other aliquot was frozen at −75±10° C. A single aliquot at 50° C. was pulled at 2 weeks for testing. The other two aliquots at 50° C. were pulled at 3 weeks and frozen at −75±10° C., shown in Table 48. The testing panel is shown in Table 49. An evaluation of particulate matter by high accuracy liquid particle count (HIAC) was also executed, to evaluate surfactant.

TABLE 47
Buffers Screened for DF-hIL-12-Fc si Excipient DOE Screen

| | Buffer | | Sugar | | DF-hIL-12-Fc |
|---|---|---|---|---|---|
| Code | pH | Sugar | Conc. | Surfactant | si Conc. |
| A | 20 mM | Sucrose | High | None | 1 mg/mL |
| B | Citrate pH | | (8% w/v, | 0.01% PS80 | 1 mg/mL |
| C | 6.5 | | 233 mM) | 0.01% PS80 | 10 mg/mL |
| D | | Sucrose | Low | None | 1 mg/mL |
| | | | (4% w/v, | | |
| | | | 117 mM) | | |
| E | | Mannitol | High | None | 1 mg/ml |
| F | | | (6% w/v, | 0.01% PS80 | 1 mg/mL |
| G | | | 330 mM) | 0.01% PS80 | 10 mg/mL |
| H | | Mannitol | Low | None | 1 mg/mL |
| | | | (2% w/v, | | |
| | | | 110 mM) | | |
| I | | Sucrose | 6% w/v | None | 1 mg/mL |
| J | | Mannitol | (175 mM) | 0.01% PS80 | 1 mg/mL |
| K | | | 1% w/v | 0.01% PS80 | 10 mg/mL |
| | | | (55 mM) | | |
| L | | Sucrose | 4% w/v | None | 1 mg/mL |
| | | | (117 mM) | | |
| M | | Mannitol | 2% w/v | 0.01% PS80 | 1 mg/mL |
| N | | | (110 mM) | 0.01% PS80 | 10 mg/mL |

TABLE 48
Vial Distribution

| Vial Number | Condition | Testing |
|---|---|---|
| Vial 1 | Two weeks at 2-8° C. | Batch Tested on the |
| Vial 2 | Two weeks 50° C. | 2-8° C. sample |
| Vial 3 | 5× Freeze Thaw Cycles | only |
| | Freezing at −75 ± 10° C. | |
| | Thawing at Room Temperature | |
| Vial 4 | Two weeks at 2-8° C. | Tested as needed |
| | Then frozen at −75 ± 10° C. | |
| Vials 5 and 6 | Three weeks at 50° C. | |
| | Then frozen at −75 ± 10° C. | |

TABLE 49
Assay panel

| Test Panel | Assay Volume (μL) |
|---|---|
| Visual Appearance | In Vial |
| A₂₈₀ | 100 |
| DLS | 100 |
| SEC-HPLC, ATM-2606 | 100 |
| DSF (2-8° C. Vial 1 or | 100¹ |
| retain during sample prep)¹ | |
| HIAC² | 100 |

¹DSF performed at 1 week with material remaining from sample prep
²HIAC performed with 0.1 mL tare volume and 0.3 mL sample volume (single draw/read)

### Results

[0663] Samples of DF-hIL-12-Fc si were buffer exchanged into 14 formulations. The pH and concentration of the samples were immediately assessed. After which, the samples were aliquoted and stored at 2-8° C., 50EC, or underwent 5 freeze thaw cycles. After a two-week incubation, the samples were then assessed per the assay panel in Table 49. The untested samples were pulled and frozen as outlined previously.

[0664] Table 50 and FIGS. 43A-43B show UV-Vis Concentration Determination (time zero and 2 week samples).

TABLE 50
Concentration of DF-hIL-12-Fc si

| | | | Buffer | | | |
|---|---|---|---|---|---|---|
| | | | Exchange | 2-8° C. | 50° C. | Freeze Thaw |
| | | | Concentration | Concentration | Concentration | Concentration |
| Code | Sugar | Surfactant | (mg/mL) | (mg/mL) | (mg/mL) | (mg/mL) |
| A | 8% w/v | None | 0.90 | 0.79 | 0.80 | 0.80 |
| B | Sucrose | 0.01% PS80 | | 0.84 | 0.85 | 0.85 |
| C | | 0.01% PS80 | 10.26 | 9.94 | 10.27 | 10.20 |
| D | 4% w/v | None | 1.11 | 0.97 | 1.00 | 0.99 |
| | Sucrose | | | | | |
| E | 6% w/v | None | 0.89 | 0.81 | 0.82 | 0.82 |
| F | Mannitol | 0.01% PS80 | | 0.87 | 0.87 | 0.86 |
| G | | 0.01% PS80 | 10.61 | 10.69 | 10.91 | 10.74 |
| H | 2% w/v | None | 1.04 | 0.93 | 0.94 | 0.95 |
| | Mannitol | | | | | |
| I | 6% w/v | None | 1.03 | 0.93 | 0.92 | 0.95 |
| J | Sucrose 1% | 0.01% PS80 | | 0.98 | 0.98 | 0.98 |
| K | w/v Mannitol | 0.01% PS80 | 9.96 | 9.59 | 10.09 | 9.95 |
| L | 4% w/v | None | 1.05 | 0.92 | 0.93 | 0.94 |
| M | Sucrose 2% | 0.01% PS80 | | 0.99 | 0.98 | 0.98 |
| N | w/v Mannitol | 0.01% PS80 | 10.14 | 9.41 | 10.19 | 9.48 |

Please note: concentration = ((A₂₈₀-A₃₂₀)/1.43)*1.0 (cm path length) * Dilution Factor (if applicable)

[0665] Table 51 shows pH Determination at time zero and 2 week samples.

TABLE 51
pH values

| | | | Buffer | | | Freeze |
|---|---|---|---|---|---|---|
| | | | Exchange | 2-8° C. | 50° C. | Thaw |
| Code | Sugar | Surfactant | pH | pH | pH | pH |
| A | 8% w/v | None | 6.5 | 6.6 | 6.5 | 6.5 |
| B | Sucrose | 0.01% PS80 | | 6.5 | 6.5 | 6.5 |
| C | | 0.01% PS80 | 6.5 | 6.5 | 6.5 | 6.5 |
| D | 4% w/v | None | 6.5 | 6.6 | 6.5 | 6.5 |
| | Sucrose | | | | | |
| E | 6% w/v | None | 6.5 | 6.5 | 6.5 | 6.5 |
| F | Mannitol | 0.01% PS80 | | 6.5 | 6.5 | 6.5 |
| G | | 0.01% PS80 | 6.5 | 6.5 | 6.5 | 6.5 |
| H | 2% w/v | None | 6.5 | 6.5 | 6.5 | 6.4 |
| | Mannitol | | | | | |
| I | 6% w/v | None | 6.5 | 6.5 | 6.5 | 6.5 |
| J | Sucrose | 0.01% PS80 | | 6.5 | 6.5 | 6.5 |
| K | 1% w/v | 0.01% PS80 | 6.5 | 6.5 | 6.5 | 6.5 |
| | Mannitol | | | | | |
| L | 4% w/v | None | 6.5 | 6.5 | 6.5 | 6.5 |
| M | Sucrose | 0.01% PS80 | | 6.4 | 6.5 | 6.5 |
| N | 2% w/v | 0.01% PS80 | 6.5 | 6.5 | 6.5 | 6.4 |
| | Mannitol | | | | | |

### Visual Appearance (2 Week Samples)

[0666] All samples were colorless and clear liquids. Particulates were observed in some samples as outlined in Table 52.

TABLE 52
Appearance: Visible Particulates

| | | | 2-8° C. | 50° C. | Freeze Thaw |
|---|---|---|---|---|---|
| Code | Sugar | Surfactant | Appearance | Appearance | Appearance |
| A | 8% w/v | None | Free of visible | Some small round | Free of visible |
| | Sucrose | | particulates | visible particulates | particulates |
| B | | 0.01% PS80 | Free of visible | Free of visible | Free of visible |
| | | | particulates | particulates | particulates |
| C | | 0.01% PS80 | Free of visible | Free of visible | Free of visible |
| | | | particulates | particulates | particulates |
| D | 4% w/v | None | Free of visible | Free of visible | Some small round |
| | Sucrose | | particulates | particulates | visible particulates |
| E | 6% w/v | None | Free of visible | Free of visible | Free of visible |
| | Mannitol | | particulates | particulates | particulates |
| F | | 0.01% PS80 | Free of visible | Free of visible | Free of visible |
| | | | particulates | particulates | particulates |
| G | | 0.01% PS80 | Free of visible | Free of visible | Free of visible |
| | | | particulates | particulates | particulates |
| H | 2% w/v | None | Free of visible | Free of visible | Numerous small |
| | Mannitol | | particulates | particulates | round visible |
| | | | | | particulates |
| I | 6% w/v | None | Free of visible | Free of visible | Some small round |
| | Sucrose | | particulates | particulates | visible particulates |
| J | 1% w/v | 0.01% PS80 | Free of visible | Free of visible | Free of visible |
| | Mannitol | | particulates | particulates | particulates |
| K | | 0.01% PS80 | Free of visible | Free of visible | Free of visible |
| | | | particulates | particulates | particulates |
| L | 4% w/v | None | Free of visible | Free of visible | Some small round |
| | Sucrose | | particulates | particulates | visible particulates |
| M | 2% w/v | 0.01% PS80 | Free of visible | Free of visible | Free of visible |
| | Mannitol | | particulates | particulates | particulates |
| N | | 0.01% PS80 | Free of visible | Free of visible | Free of visible |
| | | | particulates | particulates | particulates |

### Differential Scanning Fluorimetry (DSF) (1 Week Samples)

[0667] The DSF experiments were preformed using an Unchained Labs UNcle. Samples were evaluated for their thermal stability. DF-hIL-12-Fc si thermal unfolding (Tₘ) and onset of aggregation (T_{agg}) were monitored by evaluating changes in intrinsic protein fluorescence and static light scattering (SLS at 266 nm), respectively, as a function of temperature. Samples were evaluated in triplicate, and the triplicate results were averaged. Samples were analyzed over a temperature ramp of 25° C.-95° C. at a constant linear ramp rate of 0.5° C./min. Results are shown in Table 53 and FIGS. 44A-46F.

TABLE 53
Determined DSF Tₘ₁, Tₘ₂, and T_{agg} 266
Temperatures (1 week material)

| | | | Average | Average | Average |
|---|---|---|---|---|---|
| Code | Sugar | Surfactant | Tₘ₁ (° C.) | Tₘ₂ (° C.) | T_{agg} 266 (° C.) |
| A | 8% w/v | None | 66.1 | 76.1 | 66.2¹ |
| B | Sucrose | 0.01% PS80 | 66.3 | 76.4 | 66.1 |
| C | | 0.01% PS80 | 66.4 | 77.9 | 75.6 |
| D | 4% w/v | None | 66.5 | 76.2 | 66.1 |
| | Sucrose | | | | |
| E | 6% w/v | None | 67.3 | 76.8 | 66.3 |
| F | Mannitol | 0.01% PS80 | 66.8 | 76.8 | 75.6¹ |
| G | | 0.01% PS80 | 67.1 | 77.6 | 75.9 |
| H | 2% w/v | None | 66.7 | 76.4 | 66.7 |
| | Mannitol | | | | |
| I | 6% w/v | None | 67.3 | 77.3 | 66.5 |
| J | Sucrose | 0.01% PS80 | 67.0 | 77.3 | 67.1 |
| K | 1% w/v | 0.01% PS80 | 67.1 | 78.3 | 76.0 |
| | Mannitol | | | | |
| L | 4% w/v | None | 66.9 | 77.2 | 66.5¹ |
| M | Sucrose | 0.01% PS80 | 66.8 | 76.9 | 66.7 |
| N | 2% w/v | 0.01% PS80 | 67.1 | 78.0 | 75.7 |
| | Mannitol | | | | |

¹One of the triplicates was excluded from analysis due to discrepancy in the acquired data

### Dynamic Light Scattering (DLS) (2 Week Samples)

[0668] The DLS experiments were preformed using a Malvern Zeta sizer. For each sample measurement, five consecutive scans were acquired at 25° C. The Z-average hydrodynamic diameter and polydispersity index were determined from the cumulants analysis and the Stokes Einstein equation. Polydispersity is a measurement of non-uniformity in a sample. If particles are not uniform in size, a higher polydispersity will be measured. A low polydispersity (≤0.200) indicates greater uniformity in the size of the particle. Results are shown in Tables 54-62 and in FIGS. 47A-48H.

TABLE 54
DLS Average Size

| Code | Sugar | Surfactant | 2-8° C. | 50° C. | Freeze Thaw |
|---|---|---|---|---|---|
| A | 8% w/v | None | 13.85 | 28.51 | 21.60 |
| B | Sucrose | 0.01% PS80 | 18.61 | 23.61 | 21.67 |
| C | | 0.01% PS80 | 14.75 | 30.59 | 14.66 |
| D | 4% w/v | None | 17.99 | 17.39 | 19.72 |
| | Sucrose | | | | |
| E | 6% w/v | None | 16.18 | 19.05 | 20.20 |
| F | Mannitol | 0.01% PS80 | 18.93 | 19.92 | 17.07 |
| G | | 0.01% PS80 | 14.38 | 36.92 | 13.92 |
| H | 2% w/v | None | 11.83 | 19.68 | 25.23 |
| | Mannitol | | | | |
| I | 6% w/v | None | 13.82 | 16.13 | 19.94 |
| J | Sucrose | 0.01% PS80 | 11.59 | 14.40 | 15.32 |
| K | 1% w/v | 0.01% PS80 | 14.19 | 40.96 | 13.99 |
| | Mannitol | | | | |
| L | 4% w/v | None | 24.18 | 21.08 | 19.50 |
| M | Sucrose | 0.01% PS80 | 16.03 | 17.43 | 17.20 |
| N | 2% w/v | 0.01% PS80 | 14.83 | 28.27 | 13.65 |
| | Mannitol | | | | |

| | |
|---|---|
| Starting Material | 12.25 |

TABLE 55
DLS Polydispersity

| Code | Sugar | Surfactant | 2-8° C. | 50° C. | Freeze Thaw |
|---|---|---|---|---|---|
| A | 8% w/v | None | 0.42 | 0.45 | 0.48 |
| B | Sucrose | 0.01% PS80 | 0.33 | 0.37 | 0.34 |
| C | | 0.01% PS80 | 0.15 | 0.26 | 0.14 |
| D | 4% w/v | None | 0.32 | 0.30 | 0.52 |
| | Sucrose | | | | |
| E | 6% w/v | None | 0.29 | 0.42 | 0.58 |
| F | Mannitol | 0.01% PS80 | 0.29 | 0.20 | 0.46 |
| G | | 0.01% PS80 | 0.14 | 0.24 | 0.09 |
| H | 2% w/v | None | 0.16 | 0.30 | 0.44 |
| | Mannitol | | | | |
| I | 6% w/v | None | 0.34 | 0.30 | 0.48 |
| J | Sucrose | 0.01% PS80 | 0.26 | 0.25 | 0.33 |
| K | 1% w/v | 0.01% PS80 | 0.11 | 0.22 | 0.11 |
| | Mannitol | | | | |
| L | 4% w/v | None | 0.35 | 0.35 | 0.47 |
| M | Sucrose | 0.01% PS80 | 0.32 | 0.23 | 0.40 |
| N | 2% w/v | 0.01% PS80 | 0.18 | 0.26 | 0.10 |
| | Mannitol | | | | |

| | |
|---|---|
| Starting Material | 0.09 |

TABLE 56
DLS Monomer Size

| Code | Sugar | Surfactant | 2-8° C. | 50° C. | Freeze Thaw |
|---|---|---|---|---|---|
| A | 8% w/v | None | 15.79 | 31.20 | 17.77 |
| B | Sucrose | 0.01% PS80 | 22.74 | 53.08 | 24.89 |
| C | | 0.01% PS80 | 16.76 | 44.53 | 16.87 |
| D | 4% w/v | None | 19.19 | 20.40 | 15.55 |
| | Sucrose | | | | |
| E | 6% w/v | None | 18.69 | 18.72 | 14.68 |
| F | Mannitol | 0.01% PS80 | 20.36 | 23.60 | 14.29 |
| G | | 0.01% PS80 | 16.32 | 52.95 | 15.35 |
| H | 2% w/v | None | 13.70 | 20.91 | 15.72 |
| | Mannitol | | | | |
| I | 6% w/v | None | 17.21 | 19.56 | 17.91 |
| J | Sucrose | 0.01% PS80 | 15.72 | 18.98 | 18.12 |
| K | 1% w/v | 0.01% PS80 | 16.08 | 55.60 | 15.78 |
| | Mannitol | | | | |
| L | 4% w/v | None | 17.34 | 27.61 | 17.82 |
| M | Sucrose | 0.01% PS80 | 19.60 | 22.01 | 18.15 |
| N | 2% w/v | 0.01% PS80 | 17.17 | 40.77 | 15.18 |
| | Mannitol | | | | |

| | |
|---|---|
| Starting Material | 13.47 |

TABLE 57
DLS Monomer % Pd

| Code | Sugar | Surfactant | 2-8° C. | 50° C. | Freeze Thaw |
|---|---|---|---|---|---|
| A | 8% w/v | None | 35.50 | 55.10 | 28.60 |
| B | Sucrose | 0.01% PS80 | 36.50 | 213.40 | 36.20 |
| C | | 0.01% PS80 | 36.60 | 68.00 | 36.80 |
| D | 4% w/v | None | 35.70 | 54.30 | 29.10 |
| | Sucrose | | | | |
| E | 6% w/v | None | 42.70 | 40.70 | 29.00 |
| F | Mannitol | 0.01% PS80 | 37.00 | 44.70 | 30.10 |
| G | | 0.01% PS80 | 36.20 | 67.10 | 30.70 |
| H | 2% w/v | None | 38.50 | 47.90 | 28.20 |
| | Mannitol | | | | |
| I | 6% w/v | None | 38.40 | 43.40 | 30.40 |
| J | Sucrose | 0.01% PS80 | 39.50 | 43.50 | 37.30 |
| K | 1% w/v | 0.01% PS80 | 34.50 | 59.50 | 33.60 |
| | Mannitol | | | | |
| L | 4% w/v | None | 34.90 | 66.00 | 32.20 |
| M | Sucrose | 0.01% PS80 | 42.80 | 49.10 | 36.10 |
| N | 2% w/v | 0.01% PS80 | 41.00 | 65.40 | 32.20 |
| | Mannitol | | | | |

| | |
|---|---|
| Starting Material | 31.20 |

TABLE 58
DLS Species 2 Size (200 d · nm to 1500 d · nm)

| Code | Sugar | Surfactant | 2-8° C. | 50° C. | Freeze Thaw |
|---|---|---|---|---|---|
| A | 8% w/v | None | 631.10 | 838.60 | 493.10 |
| B | | 0.01% PS80 | N/A | N/A | N/A |
| C | Sucrose | 0.01% PS80 | N/A | N/A | N/A |
| D | 4% w/v | None | N/A | 474.50 | 333.50 |
| | Sucrose | | | | |
| E | 6% w/v | None | N/A | 418.90 | 384.60 |
| F | Mannitol | 0.01% PS80 | N/A | N/A | 523.10 |
| G | | 0.01% PS80 | N/A | N/A | N/A |
| H | 2% w/v | None | N/A | 347.50 | 380.50 |
| | Mannitol | | | | |
| I | 6% w/v | None | N/A | N/A | 578.00 |
| J | Sucrose | 0.01% PS80 | N/A | N/A | N/A |
| K | 1% w/v | 0.01% PS80 | N/A | N/A | N/A |
| | Mannitol | | | | |
| L | 4% w/v | None | 971.20 | 496.60 | 600.80 |
| M | Sucrose | 0.01% PS80 | N/A | N/A | 1047.00 |
| N | 2% w/v | 0.01% PS80 | N/A | N/A | N/A |
| | Mannitol | | | | |

Starting Material

TABLE 59
DLS Species 3 Size (>1500 d.nm)

| Code | Sugar | Surfactant | 2-8° C. | 50° C. | Freeze Thaw |
|---|---|---|---|---|---|
| A | 8% w/v | None | 4548.00 | 3861.00 | 5120.00 |
| B | Sucrose | 0.01% PS80 | 4152.00 | 3025.00 | 3261.00 |
| C | | 0.01% PS80 | 4335.00 | N/A | N/A |
| D | 4% w/v | None | 1771.00 | 3873.00 | 5181.00 |
| | Sucrose | | | | |
| E | 6% w/v | None | 2538.00 | 4350.00 | N/A |
| F | Mannitol | 0.01% PS80 | 3079.00 | 4073.00 | N/A |
| G | | 0.01% PS80 | 4557.00 | N/A | N/A |
| H | 2% w/v | None | 4364.00 | 3896.00 | 5307.00 |
| | Mannitol | | | | |
| I | 6% w/v | None | 3155.00 | 2512.00 | 4862.00 |
| J | Sucrose | 0.01% PS80 | N/A | 4256.00 | 2769.00 |
| K | 1% w/v | 0.01% PS80 | N/A | N/A | N/A |
| | Mannitol | | | | |
| L | 4% w/v | None | 4428.00 | 3420.00 | 4906.00 |
| M | Sucrose | 0.01% PS80 | 3883.00 | 3969.00 | 4581.00 |
| N | 2% w/v | 0.01% PS80 | 4356.00 | N/A | N/A |
| | Mannitol | | | | |

| | |
|---|---|
| Starting Material | N/A |

TABLE 60
2-8° C. Samples Species

| Code | Sugar | Surfactant | Monomer | Species 2 | Species 3 |
|---|---|---|---|---|---|
| A | 8% w/v | None | 15.79 | 631.10 | 4548.00 |
| B | Sucrose | 0.01% PS80 | 22.74 | N/A | 4152.00 |
| C | | 0.01% PS80 | 16.76 | N/A | 4335.00 |
| D | 4% w/v | None | 19.19 | N/A | 1771.00 |
| | Sucrose | | | | |
| E | 6% w/v | None | 18.69 | N/A | 2538.00 |
| F | Mannitol | 0.01% PS80 | 20.36 | N/A | 3079.00 |
| G | | 0.01% PS80 | 16.32 | N/A | 4557.00 |
| H | 2% w/v | None | 13.70 | N/A | 4364.00 |
| | Mannitol | | | | |
| I | 6% w/v | None | 17.21 | N/A | 3155.00 |
| J | Sucrose | 0.01% PS80 | 15.72 | N/A | N/A |
| K | 1% w/v | 0.01% PS80 | 16.08 | N/A | N/A |
| | Mannitol | | | | |
| L | 4% w/v | None | 17.34 | 971.20 | 4428.00 |
| M | Sucrose | 0.01% PS80 | 19.60 | N/A | 3883.00 |
| N | 2% w/v | 0.01% PS80 | 17.17 | N/A | 4356.00 |
| | Mannitol | | | | |

TABLE 61
50° C. Samples Species

| Code | Sugar | Surfactant | Monomer | Species 2 | Species 3 |
|---|---|---|---|---|---|
| A | 8% w/v | None | 31.20 | 838.60 | 3861.00 |
| B | Sucrose | 0.01% PS80 | 53.08 | N/A | 3025.00 |
| C | | 0.01% PS80 | 44.53 | N/A | N/A |
| D | 4% w/v | None | 20.40 | 474.50 | 3873.00 |
| | Sucrose | | | | |
| E | 6% w/v | None | 18.72 | 418.90 | 4350.00 |
| F | Mannitol | 0.01% PS80 | 23.60 | N/A | 4073.00 |
| G | | 0.01% PS80 | 52.95 | N/A | N/A |
| H | 2% w/v | None | 20.91 | 347.50 | 3896.00 |
| | Mannitol | | | | |
| I | 6% w/v | None | 19.56 | N/A | 2512.00 |
| J | Sucrose | 0.01% PS80 | 18.98 | N/A | 4256.00 |
| K | 1% w/v | 0.01% PS80 | 55.60 | N/A | N/A |
| | Mannitol | | | | |
| L | 4% w/v | None | 27.61 | 496.60 | 3420.00 |
| M | Sucrose | 0.01% PS80 | 22.01 | N /A | 3969.00 |
| N | 2% w/v | 0.01% PS80 | 40.77 | N/A | N/A |
| | Mannitol | | | | |

TABLE 62
Freeze Thaw Samples Species

| Code | Sugar | Surfactant | Monomer | Species 2 | Species 3 |
|---|---|---|---|---|---|
| A | 8% w/v | None | 17.77 | 493.10 | 5120.00 |
| B | Sucrose | 0.01% PS80 | 24.89 | N/A | 3261.00 |
| C | | 0.01% PS80 | 16.87 | N/A | N/A |
| D | 4% w/v | None | 15.55 | 333.50 | 5181.00 |
| | Sucrose | | | | |
| E | 6% w/v | None | 14.68 | 384.60 | N/A |
| F | Mannitol | 0.01% PS80 | 14.29 | 523.10 | N/A |
| G | | 0.01% PS80 | 15.35 | N/A | N/A |
| H | 2% w/v | None | 15.72 | 380.50 | 5307.00 |
| | Mannitol | | | | |
| I | 6% w/v | None | 17.91 | 578.00 | 4862.00 |
| J | Sucrose | 0.01% PS80 | 18.12 | N/A | 2769.00 |
| K | 1% w/v | 0.01% PS80 | 15.78 | N/A | N/A |
| | Mannitol | | | | |
| L | 4% w/v | None | 17.82 | 600.80 | 4906.00 |
| M | Sucrose | 0.01% PS80 | 18.15 | 1047.00 | 4581.00 |
| N | 2% w/v | 0.01% PS80 | 15.18 | N/A | N/A |
| | Mannitol | | | | |

### Size Exclusion Chromatography High Performance Liquid Chromatography (SEC-HPLC) (2 Weeks Samples)

[0669] The SEC experiments were performed using a TOSOH G3000SW×1 (7.8×300 mm). The 1 mg/mL samples were injected neat, at 90 μL, to achieve a column load of 90 μg (target column load of 100 μg was not achievable given the low concentration of 1 mg/mL). The 10 mg/mL samples were injected neat, at 10 μL, to achieve a column load of 100 μg. The main peak was defined as the peak with the greatest peak area, and was consistent in retention time across all samples. Peaks eluting prior to the main peak were defined as high molecular weight (HMW) species and peaks eluting after as low molecular weight (LMW) species. The LOQ for the draft method was defined as 0.1% peak area of the total peak area.

TABLE 63
SEC-HPLC % Main

| Code | Sugar | Surfactant | 2-8° C. | 50° C. | Freeze Thaw |
|---|---|---|---|---|---|
| A | 8% w/v | None | 99.3 | 77.6 | 99.0 |
| B | Sucrose | 0.01% PS80 | 99.1 | 77.5 | 99.0 |
| C | | 0.01% PS80 | 99.3 | 74.8 | 99.2 |
| D | 4% w/v | None | 98.9 | 83.8 | 98.9 |
| | Sucrose | | | | |
| E | 6% w/v | None | 99.1 | 88.9 | 98.0 |
| F | Mannitol | 0.01% PS80 | 99.1 | 68.8 | 98.6 |
| G | | 0.01% PS80 | 99.2 | 66.3 | 99.0 |
| H | 2% w/v | None | 99.2 | 76.7 | 98.7 |
| | Mannitol | | | | |
| I | 6% w/v | None | 99.1 | 85.0 | 98.7 |
| J | Sucrose | 0.01% PS80 | 99.0 | 85.2 | 98.9 |
| K | 1% w/v | 0.01% PS80 | 99.2 | 57.4 | 99.1 |
| | Mannitol | | | | |
| L | 4% w/v | None | 99.1 | 76.6 | 98.5 |
| M | Sucrose | 0.01% PS80 | 99.1 | 78.6 | 99.0 |
| N | 2% w/v | 0.01% PS80 | 99.2 | 76.5 | 99.1 |
| | Mannitol | | | | |

| | |
|---|---|
| Starting Material | 99.4 |

TABLE 64
SEC-HPLC % HMW

| Code | Sugar | Surfactant | 2-8° C. | 50° C. | Freeze Thaw |
|---|---|---|---|---|---|
| A | 8% w/v | None | 0.7 | 20.2 | 0.9 |
| B | Sucrose | 0.01% PS80 | 0.9 | 20.4 | 1.0 |
| C | | 0.01% PS80 | 0.7 | 23.8 | 0.8 |
| D | 4% w/v | None | 0.7 | 14.6 | 1.1 |
| | Sucrose | | | | |
| E | 6% w/v | None | 0.9 | 9.3 | 2.0 |
| F | Mannitol | 0.01% PS80 | 0.9 | 29.5 | 1.4 |
| G | | 0.01% PS80 | 0.8 | 32.4 | 1.0 |
| H | 2% w/v | None | 0.7 | 21.9 | 1.3 |
| | Mannitol | | | | |
| I | 6% w/v | None | 0.9 | 13.5 | 1.3 |
| J | Sucrose | 0.01% PS80 | 1.0 | 13.3 | 1.1 |
| K | 1% w/v | 0.01% PS80 | 0.8 | 41.3 | 0.9 |
| | Mannitol | | | | |
| L | 4% w/v | None | 0.9 | 22.0 | 1.5 |
| M | Sucrose | 0.01% PS80 | 0.9 | 20.0 | 1.0 |
| N | 2% w/v | 0.01% PS80 | 0.8 | 22.4 | 0.9 |
| | Mannitol | | | | |

| | |
|---|---|
| Starting Material | 0.6 |

TABLE 65
SEC-HPLC % LMW

| Code | Sugar | Surfactant | 2-8° C. | 50° C. | Freeze Thaw |
|---|---|---|---|---|---|
| A | 8% w/v | None | <LOQ of 0.1% | 2.2 | <LOQ of 0.1% |
| B | Sucrose | 0.01% PS80 | <LOQ of 0.1% | 2.2 | <LOQ of 0.1% |
| C | | 0.01% PS80 | <LOQ of 0.1% | 1.4 | <LOQ of 0.1% |
| D | 4% w/v | None | 0.4 | 1.6 | <LOQ of 0.1% |
| | Sucrose | | | | |
| E | 6% w/v | None | <LOQ of 0.1% | 1.8 | <LOQ of 0.1% |
| F | Mannitol | 0.01% PS80 | <LOQ of 0.1% | 1.6 | <LOQ of 0.1% |
| G | | 0.01% PS80 | <LOQ of 0.1% | 1.4 | <LOQ of 0.1% |
| H | 2% w/v | None | <LOQ of 0.1% | 1.4 | <LOQ of 0.1% |
| | Mannitol | | | | |
| I | 6% w/v | None | <LOQ of 0.1% | 1.4 | <LOQ of 0.1% |
| J | Sucrose | 0.01% PS80 | <LOQ of 0.1% | 1.5 | <LOQ of 0.1% |
| K | 1% w/v | 0.01% PS80 | <LOQ of 0.1% | 1.3 | <LOQ of 0.1% |
| | Mannitol | | | | |
| L | 4% w/v | None | <LOQ of 0.1% | 1.4 | <LOQ of 0.1% |
| M | Sucrose | 0.01% PS80 | <LOQ of 0.1% | 1.5 | <LOQ of 0.1% |
| N | 2% w/v | 0.01% PS80 | <LOQ of 0.1% | 1.1 | <LOQ of 0.1% |
| | Mannitol | | | | |

| | |
|---|---|
| Starting Material | <LOQ of 0.1% |

### HIAC (2 Week Samples)

[0670] The particulate matter experiments were performed using a HIAC 9703+. For the analysis, the instrument was tared with 0.1 mL of sample prior to evaluation of 0.3 mL of sample volume. Between each run, the instrument was washed with water. In addition to the samples, the buffers and starting material were analyzed, and showed no significant number of particles. Results are shown in Tables 66-69.

TABLE 66
HIAC ≥2 μm Particles per mL

| Code | Sugar | Surfactant | 2-8° C. | 50° C. | Freeze Thaw |
|---|---|---|---|---|---|
| A | 8% w/v | None | 113.33 | 740.00 | 210.00 |
| B | Sucrose | 0.01% PS80 | 53.33 | 50.00 | 63.33 |
| C | | 0.01% PS80 | 176.67 | 193.33 | 120.00 |
| D | 4% w/v | None | 70.00 | 43.33 | 1466.67 |
| | Sucrose | | | | |
| E | 6% w/v | None | 93.33 | 83.33 | 193.33 |
| F | Mannitol | 0.01% PS80 | 73.33 | 150.00 | 73.33 |
| G | | 0.01% PS80 | 83.33 | 210.00 | 116.67 |
| H | 2% w/v | None | 40.00 | 100.00 | 5436.67 |
| | Mannitol | | | | |
| I | 6% w/v | None | 33.33 | 253.33 | 86.67 |
| J | Sucrose | 0.01% PS80 | 93.33 | 50.00 | 153.33 |
| K | 1% w/v | 0.01% PS80 | 150.00 | 280.00 | 196.67 |
| | Mannitol | | | | |
| L | 4% w/v | None | 56.67 | 76.67 | 93.33 |
| M | Sucrose | 0.01% PS80 | 283.33 | 193.33 | 60.00 |
| N | 2% w/v | 0.01% PS80 | 126.67 | 190.00 | 93.33 |
| | Mannitol | | | | |

TABLE 67
HIAC ≥5 μm Particles per mL

| Code | Sugar | Surfactant | 2-8° C. | 50° C. | Freeze Thaw |
|---|---|---|---|---|---|
| A | 8% w/v | None | 33.33 | 220.00 | 56.67 |
| B | Sucrose | 0.01% PS80 | 20.00 | 16.67 | 23.33 |
| C | | 0.01% PS80 | 53.33 | 113.33 | 50.00 |
| D | 4% w/v | None | 13.33 | 13.33 | 550.00 |
| | Sucrose | | | | |
| E | 6% w/v | None | 43.33 | 30.00 | 33.33 |
| F | Mannitol | 0.01% PS80 | 36.67 | 36.67 | 23.33 |
| G | | 0.01% PS80 | 30.00 | 46.67 | 33.33 |
| H | 2% w/v | None | 6.67 | 26.67 | 1560.00 |
| | Mannitol | | | | |
| I | 6% w/v | None | 26.67 | 56.67 | 20.00 |
| J | Sucrose | 0.01% PS80 | 33.33 | 3.33 | 36.67 |
| K | 1% w/v | 0.01% PS80 | 36.67 | 76.67 | 70.00 |
| | Mannitol | | | | |
| L | 4% w/v | None | 20.00 | 26.67 | 26.67 |
| M | Sucrose | 0.01% PS80 | 103.33 | 40.00 | 16.67 |
| N | 2% w/v | 0.01% PS80 | 40.00 | 23.33 | 33.33 |
| | Mannitol | | | | |

TABLE 68
HIAC ≥10 μm Particles per mL

| Code | Sugar | Surfactant | 2-8° C. | 50° C. | Freeze Thaw |
|---|---|---|---|---|---|
| A | 8% w/v | None | 13.33 | 60.00 | 20.00 |
| B | Sucrose | 0.01% PS80 | 6.67 | 3.33 | 6.67 |
| C | | 0.01% PS80 | 13.33 | 83.33 | 20.00 |
| D | 4% w/v | None | 6.67 | 10.00 | 66.67 |
| | Sucrose | | | | |
| E | 6% w/v | None | 10.00 | 16.67 | 13.33 |
| F | Mannitol | 0.01% PS80 | 3.33 | 10.00 | 3.33 |
| G | | 0.01% PS80 | 6.67 | 16.67 | 0.00 |
| H | 2% w/v | None | 3.33 | 6.67 | 143.33 |
| | Mannitol | | | | |
| I | 6% w/v | None | 20.00 | 26.67 | 3.33 |
| J | Sucrose | 0.01% PS80 | | | |
| K | 1% w/v | 0.01% PS80 | 13.33 | 0.00 | 0.00 |
| | Mannitol | | 16.67 | 13.33 | 33.33 |
| L | 4% w/v | None | 3.33 | 16.67 | 10.00 |
| M | Sucrose | 0.01% PS80 | 46.67 | 26.67 | 3.33 |
| N | 2% w/v | 0.01% PS80 | 10.00 | 3.33 | 20.00 |
| | Mannitol | | | | |

TABLE 69
HIAC ≥25 μm Particles per mL

| Code | Sugar | Surfactant | 2-8° C. | 50° C. | Freeze Thaw |
|---|---|---|---|---|---|
| A | 8% w/v | None | 3.33 | 0.00 | 0.00 |
| B | Sucrose | 0.01% PS80 | 0.00 | 0.00 | 0.00 |
| C | | 0.01% PS80 | 3.33 | 6.67 | 0.00 |
| D | 4% w/v | None | 0.00 | 0.00 | 0.00 |
| | Sucrose | | | | |
| E | 6% w/v | None | 0.00 | 0.00 | 0.00 |
| F | Mannitol | 0.01% PS80 | 0.00 | 0.00 | 0.00 |
| G | | 0.01% PS80 | 0.00 | 0.00 | 0.00 |
| H | 2% w/v | None | 0.00 | 6.67 | 0.00 |
| | Mannitol | | | | |
| I | 6% w/v | None | 3.33 | 6.67 | 0.00 |
| J | Sucrose | 0.01% PS80 | 3.33 | 0.00 | 0.00 |
| K | 1% w/v | 0.01% PS80 | 6.67 | 0.00 | 3.33 |
| | Mannitol | | | | |
| L | 4% w/v | None | 0.00 | 6.67 | 3.33 |
| M | Sucrose | 0.01% PS80 | 6.67 | 3.33 | 0.00 |
| N | 2% w/v | 0.01% PS80 | 0.00 | 0.00 | 6.67 |
| | Mannitol | | | | |

### Summary and Conclusions

[0671] All the samples were analyzed by visual appearance (2 week), pH (buffer exchange and 2 week), A280 (buffer exchange and 2 week), DLS (2 week), DSF (1 week), SEC (2 week), and HIAC (2 week).

[0672] The concentrations of a majority of the samples were within 10% of the target concentration at the conclusion of the buffer exchange. Both samples E (20 mM citrate, 6% mannitol, pH 6.5) and F (20 mM citrate, 6% mannitol, 0.01% PS80 pH 6.5) had concentrations of 0.89 mg/mL at the conclusion of the buffer exchange. Upon conclusion of incubation at respective conditions (2-8° C., 50° C.), 10 of the 14 formulations evaluated had concentrations consistent with their starting concentrations. All 3 samples for formulations A (20 mM citrate, 8% sucrose, pH 6.5), B (20 mM citrate, 8% sucrose, 0.01% PS80, pH 6.5), E (20 mM citrate, 6% mannitol, pH 6.5), and F (20 mM citrate, 6% mannitol, 0.01% PS80) had concentrations ranging from 0.87 mg/mL to 0.79 mg/mL.

[0673] Evaluation by pH showed no significant differences between the various samples.

[0674] Evaluation by visual appearance showed no significant differences in the color and clarity of the samples. Most of the samples, based on visual appearance, were free of visible particulates. The 50° C. sample for formulation A (20 mM citrate, 8% sucrose, pH 6.5), the freeze thaw sample for formulation D (20 mM citrate, 4% sucrose, pH 6.5), the freeze thaw sample for formulation I (20 mM citrate, 6% sucrose, 1% mannitol, pH 6.5), and the freeze thaw sample for formulation L (20 mM citrate, 4% sucrose, 2% mannitol, pH 6.5) all had some small round particulates visible. The freeze thaw sample for formulation H (20 mM citrate, 2% mannitol, pH 6.5) had numerous small round visible particulates. Notably, all 4 of these formulations lacked surfactant (0.01% P80).

[0675] Evaluation by differential scanning fluorimetry of the remaining material after buffer exchanged (stored for 1 week at 2-8° C.) showed that formulations E (20 mM citrate, 6% mannitol, pH 6.5) and I (20 mM citrate, 6% sucrose, 1% mannitol, pH 6.5) had the highest Tₘ₁ for the 1 mg/mL samples, while formulations G (20 mM citrate, 6% mannitol, 0.01% PS80, 10 mg/mL), K (20 mM citrate, 6% sucrose, 1% mannitol, 0.01% PS80 pH 6.5, 10 mg/mL), and N (20 mM citrate, 4% sucrose, 2% mannitol, 0.01% PS80, pH 6.5, 10 mg/mL) had the highest Tₘ₁ for the 10 mg/mL samples. Formulations I (20 mM citrate, 6% sucrose, 1% mannitol, pH 6.5), J (20 mM citrate, 6% sucrose, 1% mannitol, 0.01% PS80, pH 6.5), and L (20 mM citrate, 4% sucrose, 2% mannitol, pH 6.5) had the highest Tₘ₂ for the 1 mg/mL samples and formulation K (20 mM citrate, 6% sucrose, 1% mannitol, 0.01% PS80, pH 6.5, 10 mg/mL) had the highest Tₘ₂ for the 10 mg/mL samples. Formulation F (20 mM citrate, 6% mannitol, 0.01% PS80) had a significantly higher T_{agg} than the other 1 mg/mL samples. The 10 mg/mL samples were consistent with respect to T_{agg}. Overall, all samples demonstrated Tₘ₁ values >66° C.

[0676] Evaluation by SEC-HPLC of the 2 week material showed minimal variation among the 2-8° C. samples as well as the freeze thaw samples. The % Main of the 1 mg/mL 50° C. samples ranged from 68.8% to 88.9%. Formulations D (20 mM citrate, 4% sucrose, pH 6.5), E (20 mM citrate, 6% mannitol, pH 6.5), I (20 mM citrate, 6% sucrose, 1% mannitol, pH 6.5), and J (20 mM citrate, 6% sucrose, 1% mannitol, 0.01% PS80, pH 6.5) all had % Main above 80%. The % Main of the 10 mg/mL 50° C. samples ranged from 57.4% to 76.5%. Formulations C (20 mM citrate, 8% sucrose, 0.01% PS80, pH 6.5, 10 mg/mL), N (20 mM citrate, 4% sucrose, 2% mannitol, 0.01% PS80, pH 6.5, 10 mg/mL) had % Main above 70% while Formulation K (20 mM citrate, 6% sucrose, 1% mannitol, 0.01% PS80, pH 6.5, 10 mg/mL) had the lowest % Main at 57.4%.

[0677] The light scattering data indicated formulations I (20 mM citrate, 6% sucrose, 1% mannitol, pH 6.5) and J (20 mM citrate, 6% sucrose, 1% mannitol, 0.01% PS80, pH 6.5) generally had the smallest average size as well as the smallest monomer size for the 3 tested conditions. A small species was detected in some of the 1 mg/mL samples (formulations A, B, I, J, L, and M), most likely from the sucrose and mannitol. The small species was not detected in the 10 mg/mL samples, and was most likely masked by the higher concentration. Due to the automated analysis, the presence of this species complicated conclusions regarding the polydispersity of the samples. With respect to the average size, formulations I and J consistently had smaller average sizes than most of the 1 mg/mL samples for each of the 3 conditions. Formulations I and J also had a smaller monomer size for than most of the 1 mg/mL samples for the 2-8° C. condition as well as the 50° C. condition. Formulations D (20 mM citrate, 4% sucrose, pH 6.5), E (20 mM citrate, 6% mannitol, pH 6.5), F (20 mM citrate, 6% mannitol, 0.01% PS80), and H (20 mM citrate, 2% mannitol, pH 6.5) had a smaller monomer size than the rest of the 1 mg/mL samples for the freeze thaw condition. For the 10 mg/mL samples, all of the samples were largely consistent across the 3 tested conditions. The 10 mg/mL 50° C. samples displayed an appreciable increase in both average size as well as monomer size. In a number of samples a second species was detected (200 d.nm to 1200 d.nm) and in a majority of samples a third species was detected (1500 d.nm to 5500 d.nm). These larger species were primarily detected in the 1 mg/mL samples at all 3 conditions.

[0678] Evaluation by HIAC largely corroborated the visual appearance data. The 50° C. sample for formulation A (20 mM citrate, 8% sucrose, pH 6.5), the freeze thaw sample for formulation D (20 mM citrate, 4% sucrose, pH 6.5), and the freeze thaw sample for formulation H (20 mM citrate, 2% mannitol, pH 6.5) all had higher ≥2 μm particle counts, ≥5 μm particle counts, and ≥10 μm particle counts. With the exception of these three samples, the remaining samples were relatively consistent. None of the samples exceeded the USP <787> specification.

[0679] Performance of the formulation J (20 mM Citrate, 6% w/v Sucrose, 1% w/v Mannitol, 0.01% PS80, pH 6.5) was determined to be the most desirable. This buffer/excipient/surfactant combination at a higher concentration of 10 mg/mL (formulation K) did not perform well by SEC-HPLC after the 2 week incubation at 50° C. Additionally, the 1 mg/mL samples generally performed better or as well as the 10 mg/mL samples.

### Example 25: Pharmacokinetic (PK) Analysis of DF hIL12-Fc Si

[0680] DF hIL12-Fc si is a monovalent human IL12-Fc fusion protein designed to enhance the efficacy of IL12 without proportionally increasing adverse effects. DF hIL12-Fc si has a substantially longer half-life compared to rhIL12. The extended half-life of DF hIL12-Fc si enables a protracted pharmacodynamic profile without the need for frequent repeat administration and the consequent repeat spikes in IL12 exposure, which cause toxicities. The longer half-life enables significantly greater anti-tumor activity with less frequent dosing in mouse models, suggesting infrequent dosing in patients, such as once every 3 weeks (Q3W), may be efficacious and offer an acceptable safety profile.

[0681] The subcutaneous (SC) route was chosen as the most appropriate for administration of DF hIL12-Fc si because of a better pharmacokinetic (PK) profile, avoiding a spike in drug concentration at a maximum serum concentration observed post-dose (Cₘₐₓ) that may result in a better tolerability.

In vitro Pharmacology
In vitro Binding Characteristics

[0682] DF hIL12-Fc si retained the binding affinity of native IL12 and human IgG1 Fc to their respective receptors, IL12R and FcRn. In contrast, the human IgG1 Fc portion of DF hIL12-Fc si was mutated to abrogate binding to FcγRs.

In vitro Cellular Activity

[0683] To compare the potency of DF hIL12-Fc si to that of rhIL12, IFNγ production from human primary immune cells stimulated with either phytohemagglutinin (PHA) or anti-CD3 antibody was analyzed in vitro. Both DF hIL12-Fc si and rhIL12 consistently exhibited comparable potencies across IFNγ production assays with activated human PBMCs, isolated human T cells, or isolated human NK cells.

[0684] A separate in vitro study was conducted in unstimulated human PBMCs with clinical-grade DF hIL12-Fc si to evaluate for the potential of inducing cytokine release syndrome (CRS). In this study, DF hIL12-Fc si only led to a dose-dependent increase of IFNγ, consistent with expected pharmacology, but did not induce secretion of the other 7 cytokines evaluated.

In vitro Species Cross-reactivity

[0685] The in vitro activity of DF hIL12-Fc si in stimulating IFNγ release from mouse, rat, and cynomolgus monkey immune cells was analyzed in order to evaluate the appropriate species for toxicology studies.

[0686] The cynomolgus monkey (Macaca fascicularis) was selected as the only pharmacologically relevant species for the conduct of nonclinical safety studies based on: Comparisons of the amino acid sequences of IL12 across species; Binding pattern of DF hIL12-Fc si relative to IL12Rβ1 expression on cynomolgus monkey immune cell subsets in PBMCs compared to binding patterns on human PBMC subsets; and Stimulation of IFNγ release in cynomolgus monkey primary immune cells by DF hIL12-Fc si relative to that of humans.

[0687] Consistent with the literature (Schoenhaut D S, Chua A O, Wolitzky A G, Quinn P M, Dwyer C M, McComas W, et al., J Immunol. 1992; 148(11):3433-40), neither human DF hIL12-Fc si nor rhIL12 enhanced IFNγ production from mouse splenocytes or rat PBMCs.

In vivo Pharmacology
In vivo Pharmacology in Mice

[0688] As human IL12 was not functional in mouse cells, a surrogate murine IL12-Fc was generated that mirrors the human DF hIL12-Fc si drug candidate, allowing for examination of the PK/PD profile and efficacy in syngeneic mouse in vivo tumor models. Mouse IL12 is considered to have a similar expression pattern and function in mice compared to that observed in humans with native IL12 (Car 1999).

[0689] The surrogate molecule, designated DF-mIL-12-Fc si, utilizes murine IL12, in which the p35 and p40 subunits were fused to the N-termini of 2 different Fc variants. The mouse IgG2a Fc fragment was mutated to abrogate FcγR binding while retaining binding to FcRn (Schoenhaut D S, Chua A O, Wolitzky A G, Quinn P M, Dwyer C M, McComas W, et al., J Immunol. 1992; 148(11):3433-40), which has been found to be most analogous to the human Fc variant utilized in DF hIL12-Fc si (human IgG1 Fc silent).

### Ex Vivo Biological Potency of DF-mIL-12-Fc si

[0690] The potency of DF-mIL-12-Fc si (mean 50% effective concentration [EC₅₀]=2.07±0.8 pM) was comparable to that of rmIL12 (mean EC50=0.69±0.14 pM). Neither human DF hIL12-Fc si nor rhIL12 enhanced IFNγ production from mouse splenocytes, confirming a lack of species cross-reactivity.

### In Vivo Characterization and Pharmacokinetics of DF-mIL-12-Fc Si

[0691] The PK/PD profile and bioavailability of DF-mIL-12-Fc si were evaluated after a single dose administration of the molecule in BALB/c or C57BL/6 mice.

[0692] DF-mIL-12-Fc si demonstrated a protracted serum t_{1/2} of 29.85 hours, which was approximately 5 times longer than that of rmIL12 (t_{1/2}=6.05 hours). This 5-fold extended t_{1/2} of DF-mIL-12-Fc si resulted in ˜40-fold greater mediated IFNγ production (area under the concentration-time curve from the time of dosing to the time of the last observation [AUC₀₋₂₁₉ₕ]=916,654 h*pg/mL) that was more durable and sustained compared to that of relative to rmIL12 (AUC₀₋₂₁₉ₕ=20,304 h*pg/mL). IFNγ levels remained elevated for over 200 hours following a single administration of DF-mIL-12-Fc si, and this enhancement of IFNγ exposure resulted from administration DF-mIL-12-Fc si at equimolar amounts to that of the rmIL12 group, which yielded approximately the same Cₘₐₓ.

[0693] In BALB/c mice, the bioavailabilities of DF-mIL-12-Fc si were 66% and 32% when dosed IP and SC, respectively. Comparable bioavailabilities of 73% and 44% (IP and SC, respectively) were obtained in C57BL/6 mice.

[0694] Approximately 4-fold higher IFNγ secretion was observed in C57BL/6 mice compared to that of BALB/c mice (Cₘₐₓ of IFNγ was ˜25,000 and ˜6,000 μg/mL in C57BL/6 and BALB/c mice, respectively).

[0695] Importantly, the PD response, as measured by serum IFNγ levels, was similar regardless of administration route, despite the differences in bioavailability and a lower Cₘₐₓ observed following SC administration. These results suggest that the IL12-Fc format is able to achieve full PD efficacy by the SC route while exposing to only 1/10th the Cₘₐₓ as by the IV route. While certain IL12 toxicities are mediated by IFNγ and therefore may be similar following IV or SC administration, other side effects have been reported to be IFNγ independent (Leonard J P, Sherman M L, Fisher G L, Buchanan U, Larsen G, Atkins M B, et al., Blood. 1997; 90(7):2541-8) and may potentially be less pronounced following SC administration due to the lower IL12 Cₘₐₓ.

[0696] In summary, DF-mIL-12-Fc si demonstrated prolonged serum t_{1/2} and extended IFNγ production compared to rmIL12 with favorable bioavailability when dosed IP and SC in C57BL/6 and BALB/c mouse strains. However, both routes of administration yielded similar serum IFNγ levels as with IV dosing, and 4-fold higher IFNγ secretion was observed in C57BL/6 mice compared to that of BALB/c.

### DF-mIL-12-Fc si Therapeutic Index

[0697] In the B16F10 melanoma model, IL12 variants DF-mIL-12-Fc si and rmIL12 were dosed to match their IL12 serum exposure levels (DF-mIL-12-Fc si weekly and rmIL12 daily), with PD responses, tolerability, and in vivo efficacy analyzed to determine the benefit-risk profile of DF-mIL-12-Fc si in comparison to rmIL12.

[0698] Repeat SC dosing of rmIL12 in naïve C57BL/6 resulted in a profound accumulation of serum IFNγ within 6 days compared to weekly injected DF-mIL-12-Fc si; AUC IFNγ in rmIL12-treated animals was increased 2.8-4.5-fold over that in DF-mIL-12-Fc si-treated mice. In addition, subsequent doses of rmIL12 resulted in little or no IFNγ production, suggesting strong negative feedback that limits responses. In contrast, weekly administered DF-mIL-12-Fc si resulted in sustained and moderate IFNγ secretion with the second dose demonstrating a similar PD profile to the first dose. Moreover, inn B16F10 tumor-bearing C57BL/6 mice, daily dosing of 0.5 or 1 μg rmIL12 was lethal and all mice were euthanized after one week of treatment. Daily dosing of 0.25 μg rmIL12 (MTD) was less efficacious in controlling tumor progression compared to DF-mIL-12-Fc si dosed weekly at a level equimolar to 1 μg rmIL12.

[0699] These findings support that the toxicity observed in the clinical trials performed with rhIL12 were, at least partially, the consequence of a frequent administration schedule.

### Efficacy of DF-mIL-12-Fc Si Monotherapy in Mouse Tumor Models

[0700] Two different mouse models, B16F10 melanoma (derived from C57BL/6) and CT26-20.7 colon carcinoma (derived from BALB/c), were chosen to analyze DF-mIL-12-Fc si efficacy in vivo. B16F10 is a “cold” tumor model and it has been reported to be resistant to checkpoint blockade and to monoclonal antibodies with antibody-dependent cellular cytotoxicity (ADCC) function as single agents (Mosely S I, Prime J E, Sainson R C, Koopmann J O, Wang D Y, Greenawalt D M, et al., Cancer Immunol Res. 2017; 5(1):29-41). CT26 is a well characterized colon carcinoma model known to exhibit an inflammatory tumor microenvironment. CT26-20.7 is a subline of CT26 derived by transduction with a murine Tyrp1 transgene with similar growth and characteristics as the parental line.

[0701] Pharmacology studies were conducted to (1) compare in vivo activity of DF-mIL-12-Fc si and rmIL12; (2) assess dose response and frequency of DF-mIL-12-Fc si in established and large 800 mm³ tumors; (3) determine whether IP and SC administration of DF-mIL-12-Fc si mediate similar anti-tumor responses; and (4) evaluate the impact of different dosing frequencies on tumor burden.

### Efficacy of DF-mIL-12-Fc Si in CT26 Colon Carcinoma Model

[0702] In CT26-20.7 tumor-bearing BALB/c mice were treated IP once weekly for 5 weeks with DF-mIL-12-Fc si, mIgG2a isotype control, or rmIL12 at doses equimolar to 1 μg rmIL12 after mean tumor volume (MTV) reached 270 mm³. Treatment with DF-mIL-12-Fc si resulted in an increased antitumor response (p<0.0001), yielding 100% complete responses (CRs) compared to 10% CR in the rmIL12-treated group.

[0703] Examination of DF-mIL-12-Fc si dose level and frequency in CT26-20.7 tumor-bearing BALB/c mice, it was observed that a single dose of DF-mIL-12-Fc si induced 100% response rate. Although all mice responded to DF-mIL-12-Fc si treatment, responses were less durable, with 20% of the tumors progressing at a later stage. Similar results were obtained when mice were dosed once weekly for 2 weeks.

[0704] Examination of a potential dose-effect revealed a significant (p<0.05) dose-dependent titration of the antitumor effect between groups treated at 1 or 0.1 μg; however, 80% of mice treated with the 10-fold lower DF-mIL-12-Fc si dose concentration (0.1 μg) responded to treatment and survival was prolonged.

[0705] Moreover, similar antitumor efficacy against CT26-20.7 tumors was observed in tumor-bearing BALB/c mice with average tumor volumes of 230 mm³ administered DF-mIL-12-Fc si via different routes (IP or SC) QW for 7 weeks at doses equimolar to 1 μg rmIL12 (FIGS. 19A-B). These findings are consistent with published data indicating that IFNγ is a major mediator of anti-tumor efficacy, and these studies with DF-mIL-12-Fc si demonstrated similar levels of IFNγ after IV, IP or SC administration, despite differences in Cₘₐₓ with the various routes.

[0706] To analyze whether DF-mIL-12-Fc si monotherapy could induce effective immune responses against larger, end-stage tumors, CT26-20.7 tumor-bearing mice were treated 18 days post-inoculum, after tumor volumes had reached an average of 815 mm³. DF-mIL-12-Fc si was administered SC once weekly at dose levels equimolar to 1 or 2 μg of rmIL12 for 7 weeks, or equimolar to 2 μg dosed once. In this model with larger tumor volumes, a single dose of 2 μg DF-mIL-12-Fc si was sufficient to induce potent antitumor responses, with a CR rate of 80%. Moreover, weekly dosing at either 1 or 2 μg maintained tumor control, resulting in CR rates of 100% (1 μg weekly) or 90% (2 μg weekly). DF-mIL-12-Fc si was well tolerated, without clinical observations or effects on body weight, while mediating regression of the larger tumors.

Efficacy of DF-mIL-12-Fc Si Combination Therapy with PD1 Blockade in B16F10 Melanoma Model

[0707] PD1 blockade is known to have little or no efficacy against established B16F10 tumors (Mosely 2017). Combination therapy of DF-mIL-12-Fc si and PD1 blockade was performed in the B16F10 tumor model in 2 studies to analyze whether an antitumor immune response could be amplified. C57BL/6 mice were treated with DF-mIL-12-Fc si or anti-PD1 as single agents and in combination once average tumor volumes reached ˜215 mm³ or ˜200 mm³ (Study 1 and Study 2, respectively). Tumor-bearing mice were administered DF-mIL-12-Fc si IP (QW for 8 weeks in Study 1) or SC (QW for 7 weeks in Study 2) at a dose equimolar to 0.5 μg of rmIL12, and anti-PD1 was administered twice weekly IP at 200 μg (twice weekly for 19 or 13 doses, in Study 1 or 2, respectively).

[0708] While administration of DF-mIL-12-Fc si alone delayed tumor regression, combination with PD1 blockade further extended the duration of antitumor responses. Survival was extended with DF-mIL-12-Fc si in combination with PD1 blockade compared to that observed with either monotherapy. Despite the synergistic efficacy, the regimen of DF-mIL-12-Fc si and anti-PD1 combination therapy appeared to be well tolerated by B16F10 tumor-bearing mice. There were no signs of additive or synergistic toxicity with the combination of DF-mIL-12-Fc si and anti-PD1, and there were neither clinical observations nor effects on body weight.

In vivo Pharmacology in Monkeys

[0709] DF hIL12-Fc si was administered IV (1.9 to 40 μg/kg) or SC (1 to 20 μg/kg) in cynomolgus monkeys in the nonclinical toxicology studies. After administration, a substantial secondary peak of PD markers IFNγ and interferon gamma-inducible protein 10 (IP-10) followed, which was dose dependent.

[0710] In non-GLP and GLP studies, monkeys treated with DF hIL12-Fc si demonstrated a generally dose-dependent increase in IFNγ, with peak levels occurring 48 to 72 hrs post-dose. IP10 was also similarly increased. In head to head non-GLP comparisons with rhIL-12 and DF hIL12-Fc si at equimolar dose levels, DF hIL12-Fc si generally caused a greater increase in IFNγ that lasted longer than the IFNγ response produced by rhIL12. DF hIL12-Fc si produced IFNγ responses that were still detectable 120-168 hrs post-dose, while molar equivalent rhIL12 IFNγ returned to baseline at similar timepoints. The more durable IFNγ response of DF hIL12-Fc si is most likely due to DF hIL12-Fc si's prolonged t_{1/2} in comparison to rhIL12. IP10 was not assessed in the non-GLP head to head comparisons with rhIL12.

[0711] In the GLP study, peak IFNγ levels were generally similar at ≥8 μg/kg SC and 12 μg/kg IV, though there was some individual animal variability within groups. Some attenuation of the IFNγ and IP10 response was observed after repeat dosing, but some monkeys in the GLP study demonstrated significant IFNγ response to the first and second dose. After the third dose in the GLP study, there was minimal to no increase in IFNγ either due to attenuation or possible impact of anti-drug antibodies (ADA). IP10 response after the third dose of DF hIL12-Fc si was more significant than the IFNγ response, possibly reflecting greater t_{1/2} of IP10.

### Secondary Pharmacology

### Binding to FcγR

[0712] The potential for DF hIL12-Fc si to bind to FcγRs was evaluated by surface plasmon resonance (SPR). The Biacore™ 8K SPR system was used to evaluate binding of DF hIL12-Fc si to recombinant human (CD64, CD32a H131 and R131 alleles, CD16a V158 and F158 alleles, CD32b, CD16b) and cynomolgus (CD64 and CD16) receptors that were captured on the chip via site-specific biotinylation. Trastuzumab, a well-established IgG1 biologic drug, was used as an isotype-specific experimental control. Qualitative assessment of the data concluded that DF hIL12-Fc si did not demonstrate meaningful binding to any of the FcγRs tested. In contrast, titration of the IgG1 control trastuzumab at the same receptor-specific, physiologically relevant concentrations demonstrated a full range of dose-dependent binding across FcγRs, as expected.

[0713] Furthermore, the human IgG1 Fc domain is known to bind C1q, a component of the classical complement cascade which mediates complement-dependent cytotoxicity (CDC) (Idusogie 2000). To confirm that DF hIL12-Fc si does not elicit CDC, human PBMCs stimulated with PHA for 3 days were incubated with 5% human complement serum in the presence of DF hIL12-Fc si ranging from 0.0823 to 20 nM. The addition of serum did not trigger CDC. In contrast, anti-MHC1 antibody (used as a positive control) induced complement serum-dependent death of T cells.

### C-Reactive Protein as a Surrogate for IFNγ Secretion

[0714] C-reactive protein (CRP) is a marker of early phase inflammation used to monitor patients that are suspected of having severe infection. Increased CRP levels are used in the cynomolgus studies as a surrogate for the measurement of the secretion of IFN gamma, which is much more challenging to use as a clinical biomarker because of its short half-life. Based on these studies, the measurement of CRP represents a more reliable biomarker for detecting the PD activity of DF hIL12-Fc si in clinical settings.

### Binding to FcRn

[0715] An evaluation of the potential for DF hIL12-Fc si to bind to cynomolgus monkey and human FcRn showed that, as expected, human and cynomolgous monkey FcRn binding was not affected by FcγR-silencing mutations. DF hIL12-Fc si and the IgG1 isotype control trastuzumab were comparable (<1.5× difference) in their binding affinity values for cynomolgus monkey and human FcRn at pH 6.0. Likewise, both molecules were similar in their lack of quantifiable binding at the concentrations tested at pH 7.4.

### Safety Pharmacology

[0716] Safety pharmacology endpoints (e.g., cytokine assessment, body temperature, respiration rate, blood pressure, heart rate, ECG assessments, and FOB assessments) were incorporated in the GLP 3-week repeat-dose toxicology study in cynomolgus monkeys.

[0717] After administration of DF hIL12-Fc si SC up to 20 μg/kg or IV at 12 μg/kg to monkeys QW for 3 weeks, there were no DF hIL12-Fc si-related effects on body temperature, blood pressure, or the central nervous system (as measured by FOB assessments), respiratory system (as measured by respiratory rate), or cardiovascular system (as measured by ECGs and heart rate).

[0718] In the GLP, 3-week repeat-dose toxicology study, IFNγ and IP10 were robustly increased after administration of DF hIL12-Fc si, which is consistent with its expected pharmacology. There were also sporadic and minimal increases of IL-6 in some DF hIL12-Fc si-treated monkeys. In non-GLP studies in monkeys, in addition to expected IFNγ and IP10 increases, there were also minimal and primarily transient increases in IL6, macrophage inflammatory protein (MIP) MIP-1α, MIP-1β, and thymus- and activation-regulated chemokine (TARC), while other measured cytokines were unaffected. These in vivo results in monkeys are consistent with the in vitro results of the cytokine release assay in unstimulated human PBMCs, in which only a concentration-dependent increase in IFNγ was observed, and other cytokines were unaffected. Therefore, DF hIL12-Fc si has a low potential for CRS, but select cytokines (e.g., IFNγ, IP-10) are expected to increase because of the expected pharmacology of DF hIL12-Fc si.

### Pharmacokinetics and Drug Metabolism in Animals

### Overview

[0719] The toxicokinetic (TK) profile of DF hIL12-Fc si was investigated after single, repeat, and/or crossover SC (21 to 20 μg/kg) and IV (1.9 to 40 μg/kg) administration to cynomolgus monkeys in 4 non-GLP toxicology studies and 1 GLP toxicology study. Plasma TK was evaluated using DF hIL12-Fc si concentrations obtained by both enzyme-linked immunosorbent assay (ELISA) (measuring IL-12p70 of DF hIL12-Fc si by detecting each IL 12 subunit) and MSD (measuring IL12p40 and Fc of DF hIL12-Fc si). Data derived from the qualified ELISA method were the preferred source for exposure assessment of DF hIL12-Fc si. An anti-drug antibody (ADA) method was also developed to detect anti-DF hIL12-Fc si antibodies in cynomolgus monkey serum after SC dosing; this method was validated for use in the GLP 3-week toxicology study.

[0720] The predominant TK profile of DF hIL12-Fc si after SC or IV administration was characterized by dose-independent (linear) kinetics, although small animal numbers in non-GLP studies and ADA may have contributed to observed variability. There did not appear to be an overall sex-related difference in the plasma TK of DF hIL12-Fc si.

[0721] In the non-GLP studies, after SC administration, bioavailability was approximately 60% based on ELISA data. The estimated t_{1/2} ranged from 12.4 to 56.4 hours across individual animals after single or repeat SC administration in 4 non-GLP studies. The tₘₐₓ ranged from 4 to 36 hours across individual animals after SC administration, was most commonly 8 hours post-dose. Across individual animals after IV administration, the estimated t_{1/2} ranged from 16.2 to 82.4 hours, with tₘₐₓ ranging from 0.25 to 1 hour post-dose.

[0722] The TK profile of DF hIL12-Fc si was confirmed in the GLP toxicology study. In general, sex-related differences in DF hIL12-Fc si mean Cₘₐₓ, area under the concentration-time curve from the time of dosing to 24 hours post-dose (AUC₀₋₂₄), and AUC₀₋₁₆₈ values were less than 2-fold. After SC dosing, exposure, as assessed by DF hIL12-Fc si mean Cₘₐₓ and AUC₀₋₁₆₈, generally increased with increasing dose level from 4 μg/kg DF hIL12-Fc si. The increases in mean Cₘₐₓ and AUC₀₋₁₆₈ were dose proportional. No accumulation of DF hIL12-Fc si was observed after multiple doses of DF hIL12-Fc si. Subcutaneous bioavailability of DF hIL12-Fc si was approximately 40%. Mean t_{1/2} for SC administration ranged from 17.5 to 35.8 hours on Days 1 and 15, while mean t_{1/2} for IV administration was 22.2 hours on Day 1 and 45.3 hours on Day 15.

[0723] In the single-dose non-GLP SC study in monkeys, ADA to DF hIL12-Fc si was demonstrated by Day 8, with confirmed ADA up to Day 22; however, overall titers of ADA remained relatively low and close in value to low positive control. In another non-GLP study, an initial SC dose followed by an IV dose demonstrated a lower than expected IV exposure profile, which may be explained by ADA, although titers were not measured. Overall, data from non-GLP studies suggest that the SC route in monkeys may be more prone to ADA development than the IV route, which was also confirmed in the GLP study. For example, 9 of 10 monkeys at 20 μg/kg SC and 3 of 10 monkeys at 12 μg/kg IV developed ADA by Day 15 in the GLP study. The majority of confirmed ADA samples were seen on Day 15 before the third dose, and maximum concentrations (Cₘₐₓ) was impacted in some animals, suggesting the presence of neutralizing antibodies. ADA impacted exposures of individual monkeys in both the non-GLP and GLP studies, but suitable exposure was achieved for a long enough duration to confidently define the toxicology profile of DF hIL12-Fc si. However, ADA in monkeys is not predictive of immunogenicity in humans. For these reasons, the DF hIL12-Fc si-001 first-in-human (FIH) study will evaluate serum titers of anti-DF hIL12-Fc si antibodies throughout the study.

[0724] Additionally, the pharmacologic response to DF hIL12-Fc si, as measured by IFNγ response, was variable across individual animals, with no apparent sex-related differences, but showed some dose-dependency when comparing tolerated doses. The peak IFNγ response ranged from 3 to 5 days post-dose across animals in the non-GLP and GLP studies. In the GLP study, the IFNγ response was attenuated with repeat dosing, although a small percentage of animals demonstrated an IFNγ response after both the first and second doses. Additionally, dose-dependent increases in IP-10 were detectable after the first and third doses, with attenuation. The route of administration did not appear to impact the timing of the peak pharmacologic response.

[0725] Studies to evaluate metabolism and excretion have not been conducted because these studies, which are routinely conducted for small molecule drugs, are not considered necessary or useful for biologics such as monoclonal antibodies. Dedicated studies have not been conducted to evaluate drug-drug interactions (DDIs) because there is no reason to believe that DF hIL12-Fc si, an IL12-Fc fusion protein, is metabolized by cytochrome P450 (CYP) enzymes. Therefore, it is unlikely that a small molecule that inhibits or induces CYP enzymes could impact the PK of DF hIL12-Fc si, and thus, the PK DDI potential for DF hIL12-Fc si is considered to be low.

### Absorption and Pharmacokinetics

### Single-Dose Pharmacokinetics

[0726] Exposures after administration of a single dose of DF hIL12-Fc si as part of the single- or repeat-dose toxicology studies were informative for acute toxicity assessment. Across studies, DF hIL12-Fc si was tolerated up to 20 μg/kg as a single SC dose. The single-dose IV maximum tolerated dose (MTD) was ≤19 μg/kg in females and ≤20 μg/kg in males; a single IV dose ≥20 or ≥40 μg/kg in females or males, respectively, resulted in early euthanasia 8 days after DF hIL12-Fc si administration.

[0727] Day 1 exposures (as measured by Cₘₐₓ and area under the concentration-time curve from the time of dosing to the time of the last quantifiable sample [AUC₀₋ₜ]), as well as tₘₐₓ and t_{1/2}, derived from ELISA data obtained from the single- and repeat-dose toxicology studies are summarized in Table 70.

TABLE 70
Comparison of Day 1 Plasma Toxicokinetics in Cynomolgus Monkeys

| | Dose | | | | | | | | | | |
|---|---|---|---|---|---|---|---|---|---|---|---|
| Study (GLP | Level | Route of | | Cₘₐₓ (pg/mL) | | AUC₀₋ₜ (h*pg/mL)^{a} | | tₘₐₓ (h) | | t_{1/2} (h) | |
| Status) | (μg/kg) | Administration | n | M | F | M | F | M | F | M | F |
| RW11CN | 1 | SC | 2/sex | 2010 | 1380 | 85,100^{b} | 61,600^{b} | 8^{c} | 8^{c} | 13.8^{d} | N/A |
| (Non-GLP) | 2 | SC | 2/sex | 3900 | 1670 | 161,000^{b} | 149,000 | 6^{c} | 8^{c} | 17.3 | 42.4 |
| | 4 | SC | 2/sex | 5410 | 8010 | 425,000^{e} | 515,000^{e} | 22^{d} | 6^{c} | 32.5^{d} | 37.8 |
| TD36MM | 4 | SC | 2/sex | 8860 | 10,500 | 562,000^{e} | 590,000^{e} | 22^{c} | 22^{c} | 40.2 | 35.4 |
| (Non-GLP) | 8 | SC | 2/sex | 14,000 | 20,200 | 783,000^{e} | 1,550,000^{e} | 8^{c} | 24^{c} | 33.9 | 29.6^{d} |
| NF37DV | 4 | SC | 3/sex | 11,800 | 10,300 | 480,000 | 426,000 | 8^{c} | 8^{c} | 19.5 | 17.5 |
| (GLP) | 8 | SC | 5/sex | 16,900 | 12,800 | 1,080,000 | 720,000 | 8^{c} | 8^{c} | 18.5 | 28.0 |
| | 20 | SC | 5/sex | 25,700 | 32,900 | 2,390,000 | 2,490,000 | 24^{c} | 48^{c} | 31.9 | 35.8 |
| | 12 | IV | 5/sex | 147,000 | 189,000 | 3,240,000 | 4,440,000 | 1^{c} | 1^{c} | 25.6 | 18.8 |
| QW56LH | 1.9 | IV | 1/sex | 53,600 | 47,900 | 1,450,000 | 921,000 | 0.25 | 0.25 | 30.5 | 17.4 |
| (Non-GLP) | 19 | IV | 1/sex | 570,000 | 502,000 | 20,700,000 | 15,100,000 | 0.25 | 0.25 | 26.4 | 19.0 |
| DQ81GX | 20^{f} | IV | 2/sex | 498,000 | 572,000 | 14,800,000^{g} | 16,900,000 | 0.25^{c} | 0.25^{c} | 70.0 | 22.9 |
| (Non-GLP) | 40^{h} | IV | 2/sex | 1,120,000 | 994,000 | 37,300,000 | 40,300,000 | 0.25^{c} | 0.25^{c} | 22.7 | 37.3 |

Sources: RW11CN, TD36MM, QW56LH, DQ81GX, and NF37DV.
Cₘₐₓ: maximum plasma concentration; AUC₀₋ₜ: area under the concentration-time curve from the time of dosing to the time of the last quantifiable sample.
Note:
All TK exposures presented here were obtained using DF hIL12-Fc si plasma concentrations measured using a qualified ELISA method (targeting p70 of IL12).
^{a}AUC exposures were based on concentrations quantified through 168 hours, unless otherwise noted.
^{b}AUC₀₋₇₂.
^{c}Median value.
^{d}n = 1.
^{e}AUC₀₋₂₄₀.
^{f}DF hIL 12-Fc si was not tolerated in females at 20 μg/kg, resulting in euthanasia on Day 8.
^{g}AUC₀₋₃₃₆.
^{h}DF hIL 12-Fc si was not tolerated in males and females at 40 μg/kg, resulting in euthanasia on Day 8.

Comparison of Acute Toxicity and Exposures Across all Toxicology Studies after Single-Dose Administration

[0728] Tolerability assessment and exposures after administration of the initial, first dose in repeat-dose toxicity studies are informative for acute toxicity assessment (Studies TD36MM, QW56LH, DQ81GX, and NF37DV). The single-dose IV MTD was ≤19 μg/kg in females and ≤20 μg/kg in males; a single IV dose ≥20 or ≥40 μg/kg in females or males, respectively, resulted in early euthanasia 8 days after DF hIL12-Fc si administration (Study DQ81GX). The exposures at 19 and 20 μg/kg IV overlapped with similar IFNγ pharmacology, suggesting animal-to-animal variation in the immune system in response to DF hIL12-Fc si treatment, which may have led to differential tolerability. This is consistent with the known variability of the immune system as a target organ (Brodin P, Davis M M., Nat Rev Immunol. 2017; 17(1):21-9).

### Repeat-Dose Pharmacokinetics

[0729] Toxicokinetics after Repeat Subcutaneous Intravenous Administration of DF hIL12-Fc Si Via a Crossover Design (Studies TD36A&I and DX81GX)

[0730] In a non-GLP study (Study TD36MM), cynomolgus monkeys were administered DF hIL12-Fc si, first SC and then IV, with a 14-day washout period after each dose, with samples for TK collected through 336 hours post-dose.

[0731] After SC administration, the systemic exposure of both male and female monkeys to DF hIL12-Fc si appeared to be characterized by dose-independent (linear) kinetics over the dose range of 4 to 8 μg/kg. The systemic exposure to DF hIL12-Fc si tended to be slightly higher in females than in males.

[0732] After IV administration to monkeys who had previously received DF hIL12-Fc si by the SC route, the systemic exposure of male and female monkeys to DF hIL12-Fc si appeared to be characterized by dose-dependent (nonlinear) kinetics over the dose range of 2 to 4 μg/kg, such that increasing the dose of DF hIL12-Fc si above 2 μg/kg resulted in a lower systemic exposure than was predicted from a linear relationship in males, but a higher systemic exposure in females. These results would be consistent with the production of ADA to DF hIL12-Fc si in the 2 males and 1 female before the IV dose was administered. Consequently, the results after IV administration must be interpreted with caution.

[0733] SC bioavailability of DF hIL12-Fc si appeared to be 60% to 70% (based on 4 animals); however, it should be noted that anomalously high estimates of bioavailability (omitted from the range presented here) were observed in some animals, consistent with the production of ADA affecting the exposure after IV administration, although ADA was not measured on this study.

[0734] In another non-GLP study (DQ81GX), cynomolgus monkeys were administered DF hIL12-Fc si first via IV bolus and then SC, with a 14-day washout period between doses. A separate group of animals received rhIL12 with the same routes and frequency of administration to allow for comparison. Blood samples for TK analysis were obtained through 240 hours post-dose. Plasma concentrations of DF hIL12-Fc si and rhIL12 were measured by qualified ELISA (targeting p70 of IL12 [ie, measuring rhIL12 and DF hIL12-Fc si]) and MSD (targeting p40 and Fc of DF hIL12-Fc si [ie, measuring DF hIL12-Fc si and not measuring rhIL12]) methods. Because of the toxicity observed after IV administration of DF hIL12-Fc si, the TK profile for SC administration was characterized only for DF hIL12-Fc si (males only) and rhIL12.

[0735] Plasma concentrations of DF hIL12-Fc si after IV administration were lower when measured by the MSD method (as to be expected, given the ELISA method detects the IL12 heterodimer). While the Cₘₐₓ values derived from the MSD data were approximately 54% lower than those derived from the ELISA method, the AUC₀₋ₜ values were similar to those derived from the ELISA method in males and 18% higher in females. The AUC₀₋ₜ values of DF hIL12-Fc si in female monkeys were similar to those in males after IV administration when measured using the ELISA method but were slightly higher when measured by the MSD method. The relationships between AUC₀₋ₜ and dose level after IV administration (based on ELISA data) indicated exposures increased in a slightly greater than dose-proportional manner over the dose range of 20 to 40 μg/kg. The tₘₐₓ after IV administration was 0.25 hours post-dose (the first sampling time), as was expected, whereas the tₘₐₓ ranged from 4 to 24 hours across individual animals after SC administration.

[0736] The t_{1/2} varied quite widely (ranging from 16.2 to 82.4 hours across individual animals) after IV administration at 20 or 40 μg/kg, but could only be estimated adequately for 1 animal after SC administration (14.9 hours based on ELISA data and 62.0 hours based on MSD data). Subcutaneous bioavailability of DF hIL12-Fc si at 20 μg/kg appeared to be variable, with a mean value of 53.5% (range of 38.8% to 68.2%) based on ELISA data and 89.0% (range of 62.8% to 115.3%) based on MSD results.

[0737] The Cₘₐₓ and AUC₀₋ₜ values of rhIL12 in female monkeys were similar to those of males after IV administration; however, the Cₘₐₓ and AUC₀₋ₜ values were lower than those in males after SC administration. The tₘₐₓ after IV administration was also 0.25 hours post-dose, whereas the tₘₐₓ was 8 hours post-dose after SC administration. The t/ranged from 9.1 to 17.5 hours across individual animals after IV administration and 18.9 to 22.9 hours after SC administration. Subcutaneous bioavailability of rhIL12 at 10 μg/kg was approximately 31% in males and 18% in females (overall range of 18.0% to 35.2%).

Toxicokinetics after Repeat Intravenous Administration of DF hIL12-Fc Si (Study QW56LH)

[0738] In a non-GLP study, cynomolgus monkeys were administered DF hIL12-Fc si, or rhIL12 via IV bolus on Days 1 and 8, with samples for TK collected through 168 hours postdose. Plasma concentrations were measured by both qualified ELISA (targeting p70 of IL12 [ie, measuring rhIL12 and DF hIL12-Fc si]) and MSD (targeting p40 and Fc of DF hIL12-Fc si [ie, measuring DF hIL12-Fc si and not measuring rhIL12]) methods.

[0739] After repeated IV bolus administration of DF hIL12-Fc si, there was no accumulation of DF hIL12-Fc si. The AUC₀₋₁₆₈ of DF hIL12-Fc si increased in an approximately dose-proportional manner over the dose range of 1.9 to 19 μg/kg on Days 1 and 8 in males, but tended to increase in a greater than dose-proportional-manner in females. At 19 μg/kg, the female AUC₀₋₁₆₈ was approximately 1.8-fold higher than that predicted from a linear relationship. The AUC₀₋₁₆₈ of DF hIL12-Fc si in females was generally similar to that in males, although the female AUC₀₋₁₆₈ derived from the MSD data appeared to be lower than that of the male at 1.9 μg/kg on both Days 1 and 8.

[0740] The terminal t_{1/2} could not be estimated adequately for all animals but, where it could be estimated was in the range of 17.4 to 30.5 hours and generally appeared to be independent of dose and sex. The plasma clearance of DF hIL12-Fc si was low, and the volume of distribution was slightly lower than the blood volume (73.4 mL/kg) and considerably lower than the volume of total body water (693 mL/kg) (Davies B, Morris T., Pharm Res. 1993; 10(7):1093-5).

[0741] After repeated IV bolus administration of rhIL12, there was no accumulation of rhIL12. The AUC₀₋₁₆₈ of rhIL12 generally increased in an approximately dose-proportional manner over the dose range of 1 to 10 μg/kg on Days 1 and 8, but tended to increase in a greater than dose-proportional manner in males on Day 1. At 10 μg/kg, the male AUC₀₋₁₆₈ on Day 1 was approximately 1.8-fold higher than that predicted from a linear relationship. There did not appear to be any differences in the systemic exposure of males and females to rhIL12. The terminal t_{1/2} (7.2 to 17.0 hours) was shorter than that of DF hIL12-Fc si, the plasma clearance was low, and the volume of distribution was similar to the blood volume and considerably lower than the volume of total body water.

[0742] The shorter half-life of rhIL12 compared to that of DF hIL12-Fc si explains the greater (˜4.5× to 7.4×) AUC₀₋₁₆₈ observed with DF hIL12-Fc si.

TABLE 71
Mean Plasma Toxicokinetics of DF hIL12-Fc si After Subcutaneous or Intravenous
Administration to Cynomolgus Monkeys in a 3-Week Study (Study NF37DV)

| Dose | | | | | | | | | | |
|---|---|---|---|---|---|---|---|---|---|---|
| Level | Cₘₐₓ | | AUC₀₋₁₆₈ | | tₘₐₓ^{a} | | t_{1/2} | | F | |
| (μg/kg)/ | (pg/mL) | | (h*pg/mL) | | (h) | | (h) | | (%) | |
| Route | M | F | M | F | M | F | M | F | M | F |

Day 1^{b}

| | | | | | | | | | | | |
|---|---|---|---|---|---|---|---|---|---|---|---|
| 4 | (SC) | 11,800 | 10,300 | 480,000 | 426,000 | 8.0 | 8.0 | 19.5 | 17.5^{c} | 37.5 | 33.3 |
| 8 | (SC) | 16,900 | 12,800 | 1,080,000 | 720,000 | 8.0 | 8.0 | 18.5 | 28.0 | 42.2 | 28.1 |
| 20 | (SC) | 25,700 | 32,900 | 2,390,000 | 2,490,000 | 24.0 | 48.0 | 31.9 | 35.8^{d} | 37.4 | 38.9 |
| 12 | (IV) | 147,000 | 189,000 | 3,240,000 | 4,440,000 | 1.0 | 1.0 | 25.6 | 18.8 | NA | NA |

Day 15

| | | | | | | | | | | | |
|---|---|---|---|---|---|---|---|---|---|---|---|
| 4 | (SC) | 9580^{c} | 7240^{c} | NR | NR | 8.0^{c} | 8.0^{c} | NR | NR | NA | NA |
| 8 | (SC) | 17,300^{d} | NA | 451,000^{e} | NR | 8.0^{d} | NR | NR | NR | NA | NA |
| 20 | (SC) | 38,000^{e} | 37,300^{e} | 2,650,000^{e} | NR | 8.0^{e} | 24.0^{e} | 23.9^{e} | NR | NA | NA |
| 12 | (IV) | 155,000^{f} | 173,000^{d} | 3,400,000^{f} | 2,280,000^{d} | 1.0^{f} | 1.0^{d} | 24.2^{c} | 59.8^{e} | NA | NA |

Source: Study NF37DV.
AUC₀₋₁₆₈: area under the concentration-time curve from the time of dosing to 168 hours post-dose; ADA: anti-drug antibodies; Cₘₐₓ: maximum plasma concentration; ELISA: enzyme-linked immunosorbent assay; F: female(s); M: male(s); NA: not applicable; NR: not reported due to insufficient number of ADA-negative animals; TK: toxicokinetic(s).
Note:
All TK parameters were derived from concentrations quantified by validated ELISA. Number of animals per sex per group are denoted in the footnotes. On Day 15, exposures are presented only for animals that did not have ADA, even though there was quantifiable exposure in these ADA-positive animals. Because DF hIL 12-Fc si is intended to be dosed once every 3 weeks in patients, Day 1 exposures from monkey studies were used as the best comparison to the intended human dosing schedule.
^{a}Median values;
^{b}n = 5/sex/group on Day 1, with the exception of 4 μg/kg SC (n = 3/sex);
^{c}n = 2/sex;
^{d}n = 3/sex;
^{e}n = 1/sex;
^{f}n = 5/sex.

[0743] In general, sex-related differences in DF hIL12-Fc si mean Cₘₐₓ, AUC₀₋₂₄, and AUC₀₋₁₆₈ values were less than 2-fold. After SC dosing, exposure, as assessed by DF hIL12-Fc si mean Cₘₐₓ and AUC₀₋₁₆₈, generally increased with increasing dose level from 4 μg/kg DF hIL12-Fc si. The increases in mean Cₘₐₓ and AUC₀₋₁₆₈ were dose proportional. No accumulation of DF hIL12-Fc si was observed after multiple doses of DF hIL12-Fc si in monkeys. Subcutaneous bioavailability of DF hIL12-Fc si was approximately 40%. Mean t₂ for SC administration ranged from 17.5 to 35.8 hours on Days 1 and 15, while mean t_{1/2} for IV administration was 22.2 hours on Day 1 and 45.3 hours on Day 15.

[0744] The incidence of ADA induction to DF hIL12-Fc si was 0% (0 out of 10) at 0 μg/kg, 33% (2 out of 6) at 4 μg/kg SC, 80% (8 out of 10) at 8 μg/kg SC, 90% (9 out of 10) at 20 μg/kg SC, and 30% (3 out of 10) at 12 μg/kg IV. Plasma concentrations of DF hIL12-Fc si in the ADA-positive animals on Day 15 were overall lower, but generally still quantifiable, than those in the ADA-negative animals. The effect of ADA was variable, with plasma concentrations in ADA-positive animals ranging from being similar to those in ADA-negative animals in some cases, to being markedly lower in others. However, this indicates that, in general, the ADA-positive animals were still exposed to DF hIL12-Fc si on Day 15. Thus, ADA did not negatively impact the toxicology study interpretation, as there was adequate exposure during most of the dosing period.

### Bioavailability

[0745] After SC administration in cynomolgus monkeys in non-GLP Studies TD36MM and DQ81GX, DF hIL12-Fc si generally demonstrated bioavailability of approximately 60%, although some variability was observed. Although not confirmed, it is believed that ADA development may have impacted the second IV dose in Study TD36MM, which subsequently would have impacted bioavailability calculations; therefore, these values were excluded when considering the overall average bioavailability across animals. Table 72 presents the bioavailability across animals within these studies.

[0746] In GLP Study NF37DV, SC bioavailability of DF hIL12-Fc si, based on AUC₀₋₁₆₈, was in the range of 18.2% to 52.8% across individual male and female animals, with mean values of 35.4%. 35.1% and 38.2% after the first dose at 4, 8, and 20 μg/kg SC, respectively.

TABLE 72
Assessment of DF hIL12-Fc si Bioavailability

| Study | Route of | Animal | | Dose | Bioavailability |
|---|---|---|---|---|---|
| Number | Administration | ID | Sex | (μg/kg) | (SC/IV AUC₀₋ₜ/dose) |
| TD36MM | SC then IV | 1200 | Male | 4-SC, 2-IV | 67% |
| TD36MM | SC then IV | 1201 | Male | 4-SC, 2-IV | 59% |
| TD36MM | SC then IV | 1700 | Female | 4-SC, 2-IV | 386%ª |
| TD36MM | SC then IV | 1701 | Female | 4-SC, 2-IV | 64% |
| TD36MM | SC then IV | 2200 | Male | 8-SC, 4-IV | 536%ª |
| TD36MM | SC then IV | 2201 | Male | 8-SC, 4-IV | 604%ª |
| TD36MM | SC then IV | 2700 | Female | 8-SC, 4-IV | 62% |
| TD36MM | SC then IV | 2701 | Female | 8-SC, 4-IV | 479%ª |
| DQ81GX | IV then SC | 2170 | Male | 20-IV, 20-SC | 39% |
| DQ81GX | IV then SC | 2171 | Male | 20-IV, 20-SC | 68% |
| NF37DV | SC | 2360 | Male | 4 | 29% |
| NF37DV | SC | 2361 | Male | 4 | 33% |
| NF37DV | SC | 2362 | Male | 4 | 50% |
| NF37DV | SC | 2860 | Female | 4 | 29% |
| NF37DV | SC | 2861 | Female | 4 | 53% |
| NF37DV | SC | 2862 | Female | 4 | 18% |
| NF37DV | SC | 3360 | Male | 8 | 41% |
| NF37DV | SC | 3361 | Male | 8 | 42% |
| NF37DV | SC | 3362 | Male | 8 | 34% |
| NF37DV | SC | 3363 | Male | 8 | 51% |
| NF37DV | SC | 3364 | Male | 8 | 42% |
| NF37DV | SC | 3860 | Female | 8 | 21% |
| NF37DV | SC | 3861 | Female | 8 | 38% |
| NF37DV | SC | 3862 | Female | 8 | 38% |
| NF37DV | SC | 3863 | Female | 8 | 24% |
| NF37DV | SC | 3864 | Female | 8 | 20% |
| NF37DV | SC | 4360 | Male | 20 | 46% |
| NF37DV | SC | 4361 | Male | 20 | 35% |
| NF37DV | SC | 4362 | Male | 20 | 27% |
| NF37DV | SC | 4363 | Male | 20 | 53% |
| NF37DV | SC | 4364 | Male | 20 | 26% |
| NF37DV | SC | 4860 | Female | 20 | 50% |
| NF37DV | SC | 4861 | Female | 20 | 49% |
| NF37DV | SC | 4862 | Female | 20 | 14% |
| NF37DV | SC | 4863 | Female | 20 | 37% |
| NF37DV | SC | 4864 | Female | 20 | 45% |

Sources: Study TD36MM, DQ81GX and NF37DV.
ADA: anti-drug antibody; AUC₀₋ₜ: area under the concentration-time curve from the time of the last quantifiable sample; ID: identification; IV: intravenous(ly); SC: subcutaneous(ly).
^{a}Although not confirmed, it is believed that ADA development may have impacted the second IV dose in Study TD36MM, which impacted bioavailability calculations. Therefore, these values are not relevant when calculating the average bioavailability.

### Distribution

[0747] Volume of distribution at steady state (Vₛₛ) could only be calculated in a non-GLP study, Study QW56LH. Mean Vₛₛ was 37.6 mL/kg after the first IV dose and 47.55 mL/kg after the second IV dose. In subsequent non-GLP studies in monkeys, Vₛₛ could not be calculated because of insufficient characterization of the terminal phase after IV infusion.

[0748] In the GLP study, mean Vₛₛ was 91.9 and 71.1 mL/kg in males and females, respectively, after the first IV dose, with an overall mean Vₛₛ of 81.5 mL/kg across all 10 animals. On Day 15, the mean Vₛₛ was 107 mL/kg in males (n=2) and 108 mL/kg in the single female evaluated, for an overall mean Vₛₛ of 108 mL/kg across the 3 animals.

### Metabolism

[0749] Metabolism studies of DF hIL12-Fc si have not been conducted. Standard metabolism studies routinely conducted for small molecule drugs are not considered necessary or useful for biologics such as antibodies.

### Excretion

[0750] Excretion studies of DF hIL12-Fc si have not been conducted. Standard elimination studies routinely conducted for small molecule drugs are not considered necessary or useful for biologics such as DF hIL12-Fc si.

### Drug-Drug Interactions

[0751] No Drug-Drug interaction (DDI) studies have been performed to date. Therapeutic proteins such as cytokines or monoclonal antibodies that act as cytokine modulators are likely to exhibit interactions with small molecule drugs by influencing the expression and stability of specific cytokine p450 (CYP) enzymes and drug transporters (Huang S M, Zhao H, Lee J I, Reynolds K, Zhang L, Temple R, et al., Clin Pharmacol Ther. 2010; 87(4):497-503). Among cytokines, IL6 is known to downregulate CYP expression. Modeling shows IL-6 could reduce the intrinsic clearance of CYP3A4 by 28% at approximately 48 hours post-dose (Xu Y, Hijazi Y, Wolf A, Wu B, Sun Y N, Zhu M., CPT Pharmacometrics Syst Pharmacol. 2015; 4(9):507-15). DF hIL12-Fc si induced minimal and sporadic increases of IL6 in monkeys at tolerated doses. Given the de novo synthesis of CYP enzymes (t_{z} of 24 to 36 hours) and transient duration of the IL6 cytokine spike with DF hIL12-Fc si, the risk of DDIs is not considered significant.

[0752] Because there is no reason to believe that DF hIL12-Fc si, an IL12-Fc fusion protein, is metabolized by CYP enzymes, it is unlikely that a small molecule that inhibits or induces CYP enzymes could impact the PK of DF hIL12-Fc si. Based on these considerations, the PK DDI potential for DF hIL12-Fc si is considered to be low.

### Immunogenicity

[0753] In the single-dose toxicology study in monkeys, 7 of 12 treated animals were found to be positive for anti-drug antibody (ADA). Additionally, although ADA was not evaluated, variability in TK and anomalously high estimates of bioavailability in a 4-week repeat dose study in cynomolgus monkeys were considered consistent with the production of ADA to DF hIL12-Fc si. ADA impacted exposures of individual monkeys in both non-GLP and GLP studies, but suitable exposure was achieved for a long enough duration to confidently define the toxicology profile of DF hIL12-Fc si. ADA in monkeys is not predictive of immunogenicity in humans. For these reasons, serum titers of anti-DF hIL12-Fc si antibodies will be evaluated in clinical studies.

### Example 26: Treatment of Cancer Using DF hIL12-Fc Si

### Objectives

[0754] This clinical study is designed with the following phases: Phase 1, Phase 1b, and Phase 2.

[0755] The primary objective of Phase 1 is to assess the safety and tolerability of DF hIL12-Fc si as monotherapy, and to determine the maximum tolerated dose (MTD) of DF hIL12-Fc si in patients with advanced (unresectable, recurrent or metastatic) solid tumors.

[0756] The primary objective of Phase 1b is to assess the safety and tolerability of DF hIL12-Fc si in combination with pembrolizumab, and to determine the maximum tolerated dose (MTD) of DF hIL12-Fc si in combination with pembrolizumab in patients with advanced (unresectable, recurrent, or metastatic) solid tumors.

[0757] The primary objective of Phase 2 is to assess the Objective Response Rate (ORR) according to the Response Evaluation Criteria in Solid Tumors version 1.1 (RECIST 1.1) per an Independent Endpoint Review Committee (IERC), for all Efficacy Expansion Cohorts testing the clinical activity of DF hIL12-Fc si as a monotherapy or in combination.

[0758] The secondary objectives of Phase 1 and Phase 1b, with DF hIL12-Fc si as monotherapy and in combination with pembrolizumab, are to: Characterize the PK of DF hIL12-Fc si; evaluate immunogenicity of DF hIL12-Fc si, and to correlate its exposure and clinical activity; assess best overall response (BOR), as determined by the Investigator for DF hIL12-Fc si using RECIST 1.1; assess duration of response (DOR) of DF hIL12-Fc si, using RECIST 1.1; assess progression-free survival (PFS) for DF hIL12-Fc si, using RECIST 1.1; and assess overall survival (OS) time.

[0759] The secondary objectives of Phase 2, with DF hIL12-Fc si as monotherapy and in combination with pembrolizumab, are to: characterize the PK of DF hIL12-Fc si; assess duration of response (DOR) of DF hIL12-Fc si, per an IERC using RECIST 1.1; assess clinical benefit rate (CBR) of DF hIL12-Fc si using RECIST 1.1. CBR is defined as the percentage of patients with complete response (CR), partial response (PR), or stable disease (SD) as best response; assess the safety of DF hIL12-Fc si; evaluate the immunogenicity of DF hIL12-Fc si, and correlate with exposure and clinical activity; assess progression-free survival (PFS) for DF hIL12-Fc si, per an IERC using RECIST 1.1; and Assess overall survival (OS) time.

### Exploratory Objectives

[0760] The exploratory objectives, both with DF hIL12-Fc si as monotherapy and in combination with pembrolizumab, are to: evaluate changes from baseline in tumor and peripheral biomarkers, and the relationship to PK; assess the PK of pembrolizumab (Phase 1b and Cohort 2C only); evaluate the activity of DF hIL12-Fc si in the Efficacy Expansion Cohorts Part (Phase 2) per Investigator assessment (ORR, DOR, CBR, and BOR, by RECIST); and evaluate the association between tumor and peripheral biomarkers, and tumor response rate.

### Study Design Overview

[0761] This study is a Phase 1/2, open-label, dose-escalation study with a consecutive parallel-group efficacy expansion study, designed to determine the safety, tolerability, PK, pharmacodynamics, and preliminary anti-tumor activity of DF hIL12-Fc si as monotherapy and in combination with pembrolizumab. A schematic diagram of the study design is shown in FIG. 51A (for monotherapy) and 51B (for combination therapy with Pembrolizumab).

[0762] The study consists of 3 parts: Phase 1: Dose-escalation as a monotherapy using a 3+3 design, with Phase 1 Cohort Expansion; Phase 1b: Dose-escalation as a combination with pembrolizumab using a 3+3 design, with Phase 1b Cohort Expansion; and Phase 2: Efficacy Expansion using a group sequential design.

[0763] DF hIL12-Fc si is evaluated as a monotherapy in Efficacy Expansion cohorts in the following indications: Cohort 2A: Advanced (unresectable or metastatic) melanoma; and Cohort 2B: Advanced (unresectable or metastatic) renal cell carcinoma (RCC)

[0764] DF hIL12-Fc si is evaluated in combination with pembrolizumab in an Efficacy Expansion cohort in the following indication: Cohort C: Advanced (unresectable or metastatic) urothelial carcinoma

[0765] In each study phase, patients receive DF hIL12-Fc si on Day 1 every 3 weeks (Q3W). Patients receive DF hIL12-Fc si until confirmed progressive disease (PD), unacceptable toxicity (i.e., dose-limiting toxicity [DLT]), or any reason for withdrawal from the study or Investigational Medicinal Product (IMP) occurs.

Phase 1 Dose Escalation DF hIL12-Fc si Monotherapy

[0766] The Phase 1 Dose-escalation Phase of the study is designed to determine the dose-limiting toxicities (DLTs) and maximum tolerated dose (MTD) of DF hIL12-Fc si as monotherapy using a standard 3+3 design.

[0767] The decision to escalate to the next dose level (DL) is based on safety assessments after all patients of a cohort have had safety evaluations performed through Cycle 2, Day 1 (C2D1), unless due to DLT. In order to assess the safety of DF hIL12-Fc si, a Safety Monitoring Committee (SMC), responsible for dose-escalation decisions, is established.

[0768] After the safety of Dose Level “n” has been established, the SMC has the option to permit enrollment of up to 10 patients at that DL in the Phase 1 Expansion Cohort; no more than 30 patients can be enrolled by this process.

[0769] The MTD is defined as the highest DL at which ≤1 patient of 6 evaluable patients experiences a DLT.

Phase 1b: Dose-Escalation as a Combination with Pembrolizumab

[0770] The Phase 1b Dose-escalation Phase of the study is designed to determine the DLTs and MTD of DF hIL12-Fc si when given in combination with pembrolizumab, using a standard 3+3 design, as described for Phase 1.

[0771] Pembrolizumab is administered once every 3 weeks (on Day 1 of each cycle) per its U.S. package insert. The administration of pembrolizumab precedes that of DF hIL12-Fc si.

[0772] DF hIL12-Fc si dose levels tested in combination with pembrolizumab are the same as those tested as a monotherapy.

[0773] Phase 1b starts after any of the following criteria are met with DF hIL12-Fc si monotherapy: a Grade 2 drug-related toxicity occurs at any dose level occurring during the DLT observation period; a DLT occurs at a dose level not defined as the MTD; and dose-escalation is complete, with no MTD defined.

[0774] After one of these criteria are met, Phase 1b (DF hIL12-Fc si in combination with pembrolizumab) starts using a dose of DF hIL12-Fc si two dose levels below the one that met any of the above criteria, or if any of the criteria are met at DL1 or at DL2, the starting dose for combination is DL1, after the safety of DL1 has been established (defined by 3 patients treated at DL2 or 6 patients treated at DL1, with no more than one DLT observed at DL1).

[0775] After the safety of Dose Level “n” has been established, the SMC has the option to permit enrollment of up to 10 patients at that dose level in the Phase 1b Expansion Cohort; no more than 30 patients can be enrolled by this process.

### Phase 2 Efficacy Expansion

[0776] The following tumor types are enrolled at the recommended phase 2 dose (RP2D):

[0777] As a monotherapy: Cohort 2A: Advanced (unresectable or metastatic) melanoma; and Cohort 2B: Advanced (unresectable or metastatic) renal cell carcinoma.

[0778] In combination with pembrolizumab: Cohort 2C: Advanced (unresectable or metastatic) urothelial carcinoma.

### Inclusion and Exclusion Criteria

[0779] Male or female patients aged ≥18 years with an Eastern Cooperative Oncology Group (ECOG) performance status of 0 or 1 at study entry and an estimated life expectancy of at least 3 months are enrolled.

[0780] Key inclusion criteria in each study phase/cohort are as follows:

[0781] Dose-Escalation cohorts in Phase 1/1b: Clinical or radiological evidence of disease

[0782] Dose Expansion Cohorts in Phase 1/1b: Has one of the following tumor types: melanoma, non-small cell lung cancer (NSCLC), small-cell lung cancer (SCLC), head and neck squamous cell carcinoma (HNSCC), classical Hodgkin lymphoma, primary mediastinal large B-Cell lymphoma, urothelial carcinoma, micro-satellite instability high cancer, gastric cancer, oesophageal cancer, cervical cancer, hepatocellular cancer, Merkel cell carcinoma, renal cell carcinoma, endometrial cancer, cutaneous T cell lymphoma, or triple negative breast cancer; has measurable disease, as determined by the Investigator using the Response Evaluation Criteria for Solid Tumors (RECIST), version 1.1;

[0783] Cohort 2A

[0784] Patients with advanced melanoma who: received treatment with an anti-programmed cell death protein 1 (PD-1) antibody for at least 6 weeks; have a confirmation of PD at least 4 weeks after the initial diagnosis of PD while receiving an anti PD-1 is made. Confirmation of PD can be based on radiological or clinical observations; must have received a BRAF inhibitor if the tumor carries a BRAF activating mutation and have progressed after the last line of treatment.

[0785] Cohort 2B

[0786] Patients with advanced RCC who: have any clear cell histology component; received treatment with an anti PD-1/PD-L1 antibody and an anti-vascular endothelial growth factor therapy as a monotherapy or in combination; received ≤3 prior lines of therapy

[0787] Cohort 2C

[0788] Patients with advanced urothelial carcinoma who: have histologically or cytologically documented locally advanced or metastatic transitional cell carcinoma of the urothelium (including renal pelvis, ureters, urinary urothelial, urethra); have received one (and no more than one) platinum-containing regimen (e.g., platinum plus another agent such as gemcitabine, methotrexate, vinblastine, doxorubicin, etc.) for inoperable locally advanced or metastatic urothelial carcinoma with radiographic progression or with recurrence within 6 months after the last administration of a platinum-containing regimen as an adjuvant, which would be considered failure of a first-line, platinum-containing regimen; have received no more than 2 lines of therapy (including the platinum-containing regimen) for the treatment of the metastatic disease; have not received treatment with a checkpoint inhibitor (CPI) (i.e., anti-PD-1 or anti-PD-L1 as a monotherapy or in combination with a platinum-based chemotherapy.

### Dose Mode of Administration Dosing Schedule

[0789] DF hIL12-Fc si is administered as a subcutaneous (SC) injection Q3W (i.e., on Day 1 of each cycle). Patients receive the drug SC in a volume of not more than 1 mL in a maximum of 2 injection sites. The second administration is completed within 10 minutes after the completion of the first administration, if applicable.

[0790] In Phase 1/1b, patients are hospitalized for the night following the first administration of DF hIL12-Fc si.

[0791] The DF hIL12-Fc si DLs (μg/kg) are as follows in Table 73.

TABLE 73
DF hIL12-Fc si DLs (μg/kg)

| | DL1 | DL2 | DL3 | DL4 | DL5 | DL6 | DL7 | DL8 | DL9 | DL10 |
|---|---|---|---|---|---|---|---|---|---|---|
| Dose of DF | 0.05 | 0.10 | 0.20 | 0.40 | 0.60 | 0.80 | 1.00 | 1.20 | 1.40 | 1.75 |
| hIL12-Fc si | | | | | | | | | | |
| (μ/kg) | | | | | | | | | | |
| Equivalent | 0.021 | 0.053 | 0.105 | 0.211 | 0.316 | 0.421 | 0.526 | 0.632 | 0.737 | 0.921 |
| IL12 | | | | | | | | | | |
| (μg/kg) | | | | | | | | | | |

[0792] The dose of DF hIL12-Fc si is calculated based on the weight of the patient at baseline. The patient's calculated dose is only recalculated if the patient's weight changes by 10% or more since the time of their last dose calculation.

### Exploratory Biomarkers

### Peripheral Biomarkers

[0793] Peripheral biomarkers are assessed in the periphery in all patients, including: cellular parameters: peripheral blood mononuclear cell (PBMCs) for immunophenotyping (IPT) by flow cytometry; soluble factors: Cytokines and chemokines in serum samples; ex vivo IL12 response assay: PBMCs for ex vivo stimulation followed by analysis of IFNγ production; circulating tumor (ct) deoxyribonucleic acid (DNA).

[0794] IPT assessments are performed on PBMCs derived from whole blood samples are collected 2 hours prior to administration of DF hIL12-Fc si C1 through C3 and at each of the following study visits: C1D3, C1D8, C2D8, and C3D3.

[0795] Soluble factors are determined in serum samples collected within 2 hours prior to DF hIL12-Fc si administration on D1 of each treatment cycle, and on C1D2, C1D3, C1D5, C1D8, C1D15, C2D3, C3D3, and C4D3, and at the EOT and SFU visits.

[0796] In order to complete all the assessments on tumor materials, blood (e.g., whole blood, plasma, and serum samples), is collected from patients.

### Biomarkers Derived From Tumor Tissue

[0797] Tissue derived biomarkers are evaluated on the pre-treatment and on treatment biopsies in patients participating in the Dose-escalation phase (optional biopsies), the Phase 1/1b Expansion Cohorts part (mandatory biopsies), and the Phase 2 Efficacy Expansion Cohorts phase (mandatory biopsies).

[0798] A panel of putative markers including molecular, soluble and cellular markers is analyzed at baseline from archived tumor tissue (or fresh tumor biopsy, if available), whole blood, and serum samples to investigate a possible correlation between clinical efficacy and analyzed markers.

[0799] For patients enrolled in the Dose-escalation Phase, the level of PD-L1 expression is determined using a commercially available kit (Dako PD-L1 IHC 22C3 pharmDx) and analysis of CD3 positivity (T cell infiltration) is determined by immunohistochemistry (IHC).

[0800] For patients enrolled in the Phase 1/1b Expansion Cohorts and the Efficacy Expansion Cohorts, fresh mandatory tumor biopsies is performed at Screening (i.e., within 30 days before first study drug dose) and at pre-specified time points during the treatment period.

[0801] Other biomarkers that are assessed include: frequency and localization of tumor-infiltrated leukocytes (eg, CD8, CD4 T-cells, Treg, NK cells, macrophage [M1/2 profile] by IHC or IF), gene expression profile, and pharmacogenomics (PGx).

### Reference Therapy: Dose Mode of Administration Dosing Schedule

[0802] In Phase 1b and Cohort 2C, pembrolizumab is administered at a dose of 200 mg, once every 3 weeks via intravenous (IV) infusion, in accordance with the U.S. package insert. The administration of pembrolizumab precedes that of DF hIL12-Fc si. DF hIL12-Fc si is administered within 1 hour after the completion of the administration of pembrolizumab.

### Planned Treatment Duration Per Patient

[0803] Patients receive study treatment until development of progressive disease (PD) or unacceptable toxicity, or any criterion for withdrawal from the study or DF hIL12-Fc si occurs.

[0804] Any patients who have experienced a confirmed complete response (CR) are treated for at least 12 months after confirmation, unless a criterion for discontinuation is met, at the discretion of the Investigator. If the Investigator believes that such a patient may benefit from treatment beyond 12 months, it may be permissible to continue the treatment after discussion with the Sponsor Medical Monitor. The maximum treatment duration is 24 months.

### Statistical Methods (Includes Sample Size Calculation)

[0805] The number of the evaluable patients for this study is derived from the dose-escalation “3+3” design and the expansion cohort sizes. The final sample size may vary depending on the total number of DLs that are evaluated, patient replacement for DLT evaluation, if applicable, and expansion from 3 to 6 patients if a DLT is observed.

[0806] In the event that rapid recruitment in the expansion phase impacts supply of IMP, the screening of new patients for any cohort may be temporarily paused with 24-hours notice to Investigators.

[0807] The final sample size may vary depending on the total number of DLs that are evaluated, patient replacement for DLT evaluation, if applicable, and expansion from 3 to 6 patients if a DLT is observed.

### Efficacy Expansion as a Monotherapy (Cohorts 2A and 2B)

[0808] The primary endpoint for this phase is the ORR. For each of these cohorts, the null hypothesis is that the objective response rate (ORR) does not exceed 5% (H0: ORR<5%) and the alternative hypothesis is that the ORR is greater than 10% (H1: ORR ≥5%).

[0809] The target ORR of DF hIL12-Fc si as a monotherapy is 20%. It is expected to enroll 40 patients for each of these cohorts (i.e., approximately 80 patients in total).

[0810] Using a group sequential design, with 40 patients in each of the indication cohorts, the efficacy cohort provides ˜90% study power to detect a 15% difference at a 1-sided overall type I error rate of 0.025, assuming the target ORR of 20% for DF hIL12-Fc si.

[0811] For each of Cohorts 2A and 2B, a futility interim analysis, with Lan-DeMets O'Brien Fleming boundary, is planned at 50% information fraction (i.e., at ˜20 patients).

[0812] The enrollment may be stopped for futility once 20 patients have completed 3 months follow-up or have withdrawn from the study, if none of the enrolled patients have achieved an unconfirmed BOR of PR or CR according to RECIST 1.1. At the end of the study, a cohort is declared successful if at least 5 patients achieve a confirmed BOR of PR or CR according to RECIST 1.1.

Efficacy Expansion in Combination with Pembrolizumab (Cohort 2C)

[0813] The Phase 2 portion for efficacy expansion in combination with pembrolizumab determines the clinical activity of DF hIL12-Fc si in combination in patients with UBC who have progressed after one line of platinum-based chemotherapy.

[0814] The primary endpoint is the ORR. The study enrolls 40 patients so that the observation of 15 responses (CR or PR) out of the 40 patients enroll will lead to a 95% CI (0.2317; 0.5419) that excludes the value of the percentage of responses reported for pembrolizumab in a similar population, that was enrolled in KEYNOTE-045. In that study, the ORR was 21.7% (Bellmunt J, de Wit R, Vaughn D J, Fradet Y, Lee J L, Fong L, et al., N Engl J Med. 2017; 376(11):1015-1026).

[0815] A minimum 4-week metric is used to qualify SD and to confirm CR, PR or PD. DOR is defined from the time between the first observation of a CR or PR and disease progression. PFS, is defined according to RECIST 1.1 and defined from first administration of study treatment until first observation of progressive disease or death, whichever comes first. OS is defined as the time from first administration of study treatment to death.

[0816] Safety analyses are summarized by descriptive statistical presentation, by cohort and/or across cohorts.

### Example 27: Treatment of Cancer Using DF hIL12-Fc Si in a Single Dose

[0817] The primary objective of this study is to assess the safety and tolerability of DF hIL12-Fc si as a monotherapy when administered in a single dose, and to determine the maximum tolerated dose (MTD) of DF hIL12-Fc si in patients with advanced (unresectable, recurrent or metastatic) solid tumors. DF hIL12-Fc si is administered as a subcutaneous (SC) injection in a single dose. Patients receive the drug SC in a volume of not more than 1 mL in a maximum of 2 injection sites. The second administration is completed within 10 minutes after the completion of the first administration, if applicable. The patients receive only the single dose of DF hIL12-Fc si.

### Example 28: Treatment of Cancer Using DF hIL12-Fc Si

[0818] This is a Phase 1/2, open-label, dose-escalation study with a consecutive parallel-group efficacy expansion study, designed to determine the safety, toleratbility, PK, pharmacodynamics, and preliminary anti-tumor activity of DF-hIL-12-Fc si as monotherapy and in combination with pembrolizumab.

TABLE 74
Phase 1/2, Open-Label, Dose-Escalation Study

| Condition or Disease | Intervention/Treatment | Phase |
|---|---|---|
| Solid Tumor; Melanoma; | Biological/Vaccine: | Phase 1/ |
| renal cell carcinoma; | DF-hIL-12-Fc si; | Phase 2 |
| urothelial carcinoma | Biological/Vaccine: | |
| | Pembrolizumab | |

[0819] The study consists of 3 parts: Phase 1: Dose-escalation as a monotherapy using a 3+3 design, with Phase 1 Cohort Expansion; Phase 1b: Dose-escalating as a combination with pembrolizumab using a 3+3 design, with Phase 1b cohort Expansion; Phase 2: Efficacy Expansion using a group sequential design.

[0820] In phase 2, DF-hIL-12-Fc si is evaluated as a monotherapy in the following indications: Cohort 2A: Advanced (unresectable or metastatic) melanoma; Cohort 2B: Advanced (unresectable or metastatic) renal cell carcinoma (RCC).

[0821] In phase 2, DF-hIL-12-Fc si is evaluated in combination with pembrolizumab in the following indication: Cohort C: Advanced (unresectable or metstatic) urothelial carcinoma.

[0822] In each study phase, patent is receive DF-hIL-12-Fc si on Day 1 every 3 weeks (Q3W). Patients receive DF-hIL-12-Fc si until confirmed progressive disease (PD), unacceptable toxicity (i.e., dose-limiting toxicity [DSL]), or any reason for withdrawal from the study or Investigational Medicinal Product (IMP) occurs.

[0823] The arms and interventations are presented in Table 75 below.

TABLE 75
Arms and Interventions

| Arm | Intervention/Treatment |
|---|---|
| Experimental DF-hIL-12-Fc si | Biological/Vaccine DF-hIL-12-Fc si; |
| Monotherapy Dose Escalation; | DF-hIL-12-Fc si is a monovalent human |
| 3 + 3 dose escalation of subcutaneous DF- | interleukin-12 (IL-12) constant fragment |
| hIL-12-Fc si as monotherapy in patients with | (Fc) fusion protein that binds to the IL-12 |
| solid tumors. | receptor. |
| Experimental: DF-hIL-12-Fc si | Biological/Vaccine: DF-hIL-12-Fc si; |
| Monotherapy Expansion (Melanoma); | DF-hIL-12-Fc si is a monovalent human |
| Dose expansion of up to 40 | interleukin 12 (IL-12)-constant fragment |
| patients with melanoma receiving | (Fc) fusion protein that binds to the IL-12 |
| subcutaneous DF-hIL-12-Fc si as | receptor |
| monotherapy. | |
| Experimental: DF-hIL-12-Fc si | Biological/Vaccine: DF-hIL-12-Fc si; |
| Monotherapy Expansion (Renal Cell); | DF-hIL-12-Fc si is a monovalent human |
| Dose expansion of up to 40 patients with | interleukin 12 (IL-12)-constant fragment |
| renal cell carcinoma receiving subcutaneous | (Fc) fusion protein that binds to the IL-12 |
| DF-hIL-12-Fc si as monotherapy | receptor |
| Experimental: DF-hIL-12-Fc si In | Biological/Vaccine: DF-hIL-12-Fc si; |
| Combination with Keytruda Escalation; 3 + 3 | DF-hIL-12-Fc si is a monovalent human |
| dose escalation of subcutaneous DF-hIL-12- | interleukin-12 (IL-12) constant fragment |
| Fc si in combination with intravenous | (Fc) fusion protein that binds to the IL-12 |
| Keytruda. | receptor; |
| | Biological/Vaccine: Pembrolizumab; |
| | Pembrolizumab is a potent and highly |
| | selective humanized mAb of the |
| | Immunoglobulin (IgG4)/kappa isotype |
| | designed to directly block the interaction |
| | between PD-1 and its ligands, PD-L1 and |
| | PD-L2; Other names: Keytruda |
| Experimental: DF-hIL-12-Fc si in | Biological/Vaccine: DF-hIL-12-Fc si; |
| Combination with Keytruda | DF-hIL-12-Fc si is a monovalent human |
| Expansion (Urothelial); | interleukin-12 (IL-12)-constant fragment |
| Dose expansion of up to 40 patients with | (Fc) fusion protein that binds to the IL-12 |
| urothelial carcinoma receiving subcutaneous | receptor; |
| DF-hIL-12-Fc si in combination with | Biological/Vaccine: Pembrolizumab; |
| intravenous Keytruda. | Pembrolizumab is a potent and highly |
| | selective humanized mAb of the |
| | Immunoglobulin (IgG4)/kappa isotype |
| | designed to directly block the interaction |
| | between PD-1 and its ligands, PD-L1 and |
| | PD-L2; Other names: Keytruda |

[0824] The primary outcome measures include: 1. Assessment of the number of dose limiting toxicities experienced on study with monotherapy DF-hIL-12-Fc si as defined per criteria in the study protocol [Time Frame: First 3 weeks on treatment for each subject]; To assess the number of adverse events experienced during treatment with monotherapy DF-hIL-12-Fc si that meet dose limiting toxicity criteria per the study protocol; 2. Assessment of the number of dose limiting toxicities experienced on study with combination therapy of DF-hIL-12-Fc si and pembrolizumab as defined per criteria in the study protocol [Time Frame: First 3 weeks on treatment for each subject in the combination therapy cohort]; To assess the number of adverse events experienced during treatment with combination therapy of DF-hIL-12-Fc si and pembrolizumab that meet dose limiting toxicity; criteria per the study protocol; 3. Assess overall response rate [Time Frame: Through 90 days after completion of the study, an average of 1 year]; To assess the Overall Response Rate (ORR) per RECIST version 1.1 criteria of patients in the Phase 2 expansion cohorts.

[0825] The secondary outcome measures include: 1. Assess number of treatment emergent adverse events throughout study [Time Frame: Until 30 days after the last treatment of the last subject enrolled in the Phase 2 portion of the study]; Characterize the safety profile of DF-hIL-12-Fc si by assessing the number of adverse events occurring while on treatment with DF-hIL-12-Fc si; 2. Determine serum concentrations of DF-hIL-12-Fc si at various timepoints [Time Frame: From start of treatment up through 28 days after last treatment]; Concentration vs time of DF-hIL-12-Fc si will be measured using blood samples taken a various time points on study; 3. Assess Duration of Response [Time Frame: From time of initiation of therapy until the date of first documented tumor progression, assessed up to 24 months]; To assess duration of response using RECIST 1.1 criteria; 4. Assess Best Overall Response [Time Frame: Through 90 days after completion of the study, an average of 1 year]; To assess best overall response using RECIST 1.1 criteria; 5. Assess Overall Survival [Time Frame: Time from enrollment in the study until death, measured up to 2 years after last treatment on study]; To assess overall survival following treatment; 6. Assess Overall Response Rate [Time Frame: lime from enrollment in the study until up to 2 years after last treatment on study]; To assess overall response rate according to Investigator judgment.

### Eligibility Criteria

[0826] The inclusion criteria (general phase 1) are: 1. Signed written informed consent; 2. Male or female patients aged ≥18 years; 3. Histologically or cytologically proven locally advanced or metastatic solid tumors, for which no standard therapy exists, or standard therapy has failed; 4. ECOG performance status of 0 or 1 at study entry and an estimated life expectancy of at least 3 months; 5. Clinical or radiological evidence of disease; 6. Archived tumor biopsy available, not older than 6 months, at least 8 slides available; or optional fresh biopsy obtained within the Screening window; 7. Adequate hematological function defined by white blood cell (WBC) count ≥3×10⁹/L with absolute neutrophil count (ANC) ≥1.5×10⁹/L, lymphocyte count ≥0.5×10⁹/L, platelet count ≥75×10⁹/L, and hemoglobin ≥9 g/dL (may have been transfused); 8. Adequate hepatic function defined by a total bilirubin level ≤1.5× the upper limit of normal (ULN), an AST level ≤2.5×ULN, and an ALT level ≤2.5×ULN or, for patients with documented metastatic disease to the liver, AST and ALT levels ≤5×ULN; 9. Adequate renal function defined by an estimated creatinine clearance 50 ml/min according to the Cockcroft-Gault formula; 10. Experienced resolution of toxic effect(s) of the most recent prior anti-cancer therapy to ≤Grade 1 (except alopecia) per NCI CTCAE v5.0 If a patient underwent major surgery or radiation therapy of >30 Gray, the patient must have recovered from the toxicity and/or complications from the intervention (Patients with ≤Grade 2 neuropathy or ≤Grade 2 alopecia are an exception to this criterion and may qualify for the study); 11. Effective contraception for women of child bearing potential (WOCBP) patients as defined by World Health Organization (WHO) guidelines for 1 “highly effective” method or 2 “effective” methods; 12. Eligible to receive pembrolizumab per its approved label. (Combination cohorts only).

[0827] Additional Phase 1 Monotherpahy Expansion Inclusion Criteria are: 1. Has one of the following tumor types: melanoma, non-small cell lung cancer (NSCLC), small cell lung cancer (SCLC), head and neck squamous cell carcinoma (HNSCC), classical Hodgkin lymphoma, primary mediastinal large B-Cell lymphoma, urothelial carcinoma, micro satellite instability high cancer, gastric cancer, oesophageal cancer, cervical cancer, hepatocellular cancer, Merkel cell carcinoma, renal cell carcinoma, endometrial cancer, cutaneous T cell lymphoma, or triple negative breast cancer; 2. Measurable disease, as determined by the Investigator using RECIST, version 1.1; 3. Agrees to undergo a pre-treatment biopsy and another biopsy while on treatment; 4. Has a clinical/radiological presentation of their disease consistent with the execution of a pre-treatment biopsy and another biopsy while on treatment.

[0828] Additional Phase 1b Combination Therapy Expansion Cohort Criteria are: 1. Measurable disease, as determined by the Investigator using RECIST, version 1.1; 2. Agrees to undergo a pre-treatment biopsy and another biopsy while on treatment; 3. Has a clinical/radiological presentation of their disease consistent with the execution of a pre-treatment biopsy and another biopsy while on treatment.

[0829] Inclusion criteria (General Phase 2) are: 1. Signed written informed consent; 2. Male or female patients aged ≥18 years; 3. ECOG performance status of 0 or 1 at study entry and an estimated life expectancy of at least 3 months; 4. Measurable disease, as determined by the Investigator using RECIST, version 1.1; 5. Agrees to undergo a pre-treatment biopsy and another biopsy while on treatment; 6. Adequate hematological function defined by WBC count ≥3×10⁹/L with ANC ≥1.5×10⁹/L, lymphocyte count ≥0.5×10⁹/L, platelet count ≥75×10⁹/L, and hemoglobin ≥9 g/dL (may have been transfused); 7. Adequate hepatic function defined by a total bilirubin level ≤1.5×ULN, an AST level ≤2.5×ULN, and an ALT level ≤2.5×ULN or, for patients with documented metastatic disease to the liver, AST and ALT levels ≤5×ULN; 8. Adequate renal function defined by an estimated creatinine clearance >50 ml/min according to the Cockcroft-Gault formula; 9. Experienced resolution of toxic effect(s) of the most recent prior anti-cancer therapy to Grade ≤1 (except alopecia) per NCI CTCAE v5.0 If a patient underwent major surgery or radiation therapy of >30 Gray, the patient must have recovered from the toxicity and/or complications from the intervention (Patients with ≤Grade 2 neuropathy or ≤Grade 2 alopecia are an exception to this criterion and may qualify for the study); 10. Has a clinical/radiological presentation of their disease consistent with the execution of a pre-treatment biopsy and another biopsy while on treatment; 11. Effective contraception for WOCBP patients as defined by WHO guidelines for 1 “highly effective” method or 2 “effective” methods.

[0830] Additional Phase 2 Inclusion Criteria (Melanoma only) are: 1. Received treatment with an anti PD-1 antibody for at least 6 weeks; 2. Have a confirmation of PD at least 4 weeks after the initial diagnosis of PD while receiving an anti PD-1 is made. Confirmation of PD can be based on radiological or clinical observations; 3. Must have received a BRAF inhibitor if the tumor carries a BRAF activating mutation and have progressed after the last line of treatment.

[0831] Additional Phase 2 Inclusion Criteria (Renal Cell only) are: 1. Any clear cell histology component; 2. Received treatment with an anti PD-1/PD-L 1 antibody or an anti-vascular endothelial growth factor therapy as monotherapy or in combination; 3. Received ≤3 prior lines of therapy.

[0832] Additional Phase 2 Inclusion Criteria (Urothelial Carcinoma only) are: 1. Histologically or cytologically documented locally advanced or metastatic transitional cell carcinoma of the urothelium (including renal pelvis, ureters, urinary urothelial, urethra); 2. Must have received one (and no more than one) platinum-containing regimen (e.g., platinum plus another agent such as gemcitabine, methotrexate, vinblastine, doxorubicin) for inoperable locally advanced or metastatic urothelial carcinoma with radiographic progression or with recurrence within 6 months after the last administration of a platinum-containing regimen as an adjuvant, which would be considered failure of a first-line, platinum-containing regimen; 3. Have received no more than 2 lines of therapy (including the platinum-containing regimen) for the treatment of the metastatic disease; 4. Must NOT have received treatment with a CPI (i.e., anti-PD-1 or anti-PD-L1 as a monotherapy or in combination with a platinum-based chemotherapy.

[0833] The Exclusion Criteria are: 1. Concurrent treatment with a non-permitted drug; 2. Prior treatment with rhIL2 or any recombinant long acting drug containing an IL2 moiety; 3. Concurrent anticancer treatment (eg, cytoreductive therapy, radiotherapy [with the exception of palliative bone directed radiotherapy], immune therapy, or cytokine therapy except for erythropoietin), major surgery (excluding prior diagnostic biopsy), concurrent systemic therapy with steroids or other immunosuppressive agents, or use of any investigational drug within 28 days before the start of study treatment. Short-term administration of systemic steroids (ie, for allergic reactions or the management of irAEs) is allowed; Note: Patients receiving bisphosphonates are eligible provided treatment was initiated at least 14 days before the first dose of DF-hIL-12-Fc si; 4. Previous malignant disease other than the target malignancy to be investigated in this study within the last 3 years, with the exception of basal or squamous cell carcinoma of the skin, localized prostate cancer or cervical carcinoma in situ; 5. Rapidly progressive disease; 6. Any Grade 2 and higher neurological or pulmonary toxicity during a treatment with an anti-PD-1 or PD-L1 agent administered as a monotherapy; 7. Active or history of central nervous system (CNS) metastases. Melanoma patients with brain metastasis(ses) are eligible if they have been stable for 4 weeks after treatment; 8. Receipt of any organ transplantation including autologous or allogeneic stem-cell transplantation; 9. Significant acute or chronic infections (including historic positive test for human immunodeficiency virus [HIV], or active or latent hepatitis B or active hepatitis C tested during the Screening window); 10. Preexisting autoimmune disease (except for patients with vitiligo) needing treatment with systemic immunosuppressive agents for more than 28 days within the last 3 years or clinically relevant immunodeficiencies (eg, dys-gammaglobulinemia or congenital immunodeficiencies), or fever within 7 days of Day 1; 11. Known severe hypersensitivity reactions to monoclonal antibodies (mAbs) (≥Grade 3 NCI CTCAE v5.0), any history of anaphylaxis, or uncontrolled asthma (ie, 3 or more features of partly controlled asthma); 12. Persisting toxicity related to prior therapy ≥Grade 2 NCI CTCAE v5.0, however alopecia and sensory neuropathy ≤Grade 2 is acceptable; 13. Pregnancy or lactation in females during the study; 14. Known alcohol or drug abuse; 15. Serious cardiac illness or medical conditions including but not limited to: a. History of New York Heart Association class III or IV heart failure or systolic dysfunction (left ventricular ejection fraction [LVEF]<55%); b. High-risk uncontrolled arrhythmias ie, tachycardia with a heart rate >100/min at rest; c. Significant ventricular arrhythmia (ventricular tachycardia) or higher-grade atrioventricular (AV)-block (second degree AV-block Type 2 [Mobitz 2) or third-degree AV-block); d. Angina pectoris requiring anti-anginal medication; e. Clinically significant valvular heart disease; f Evidence of transmural infarction on ECG; g. Poorly controlled hypertension (defined by: systolic >180 mn Hg or diastolic >100 mmHg); h. Clinically relevant uncontrolled cardiac risk factors, clinically relevant pulmonary disease or any clinically relevant medical condition in the opinion of the Investigator that may limit participation in this study; 16. All other significant diseases (e.g., inflammatory bowel disease), which, in the opinion of the Investigator, might impair the patient's ability to participate; 17. Any psychiatric condition that would prohibit the understanding or rendering of informed consent; 18. Legal incapacity or limited legal capacity; 19. Incapable of giving signed informed consent, which includes compliance with the requirements and restrictions listed in the informed consent form (ICF) and in this protocol.

### Example 29: Treatment of Cancer Using DF hIL12-Fc Si

### Objectives

[0834] This clinical study is designed with the following phases: Phase 1, Phase 1b, and Phase 2.

[0835] The primary objective of Phase 1 is to assess the safety and tolerability of DF hIL12-Fc si (also referred to as DF6002) as monotherapy, and to determine the maximum tolerated dose (MTD) of DF hIL12-Fc si in patients with advanced (unresectable, recurrent or metastatic) solid tumors.

[0836] The primary objective of Phase 1b is to assess the safety and tolerability of DF hIL12-Fc si in combination with Nivolumab, and to determine the maximum tolerated dose (MTD) of DF hIL12-Fc si in combination with Nivolumab in patients with advanced (unresectable, recurrent, or metastatic) solid tumors.

[0837] The primary objective of Phase 2 is to assess the Objective Response Rate (ORR) according to the Response Evaluation Criteria in Solid Tumors version 1.1 (RECIST 1.1) per an Independent Endpoint Review Committee (IERC), for all Efficacy Expansion Cohorts testing the clinical activity of DF hIL12-Fc si as a monotherapy or in combination.

[0838] The secondary objectives of Phase 1 and Phase 1b, with DF hIL12-Fc si as monotherapy and in combination with Nivolumab, are to: characterize the PK of DF hIL12-Fc si; evaluate immunogenicity of DF hIL12-Fc si, and to correlate its exposure and clinical activity; assess best overall response (BOR), as determined by the Investigator for DF hIL12-Fc si using RECIST 1.1; assess best overall response (BOR), as determined by the Investigator for DF hIL12-Fe si using RECIST 1.1; assess duration of response (DOR) of DF hIL12-Fc si, using RECIST 1.1; assess progression-free survival (PFS) for DF hIL12-Fc si, using RECIST 1.1; assess overall survival (OS) time.

[0839] The secondary objectives of Phase 2, with DF hIL12-Fc si as monotherapy and in combination with Nivolumab, are to: characterize the PK of DF hIL12-Fc si; assess duration of response (DOR) of DF hIL2-Fc si, per an IERC using RECIST 1.1; assess clinical benefit rate (CBR) of DF hIL12-Fc si using RECIST 1.1. CBR is defined as the percentage of patients with complete response (CR), partial response (PR), or stable disease (SD) as best response; assess the safety of DF hIL12-Fc si; evaluate the immunogenicity of DF hIL2-Fc si, and correlate with exposure and clinical activity; assess progression-free survival (PFS) for DF hIL2-Fc si, per an IERC using RECIST 1.1; and assess overall survival (OS) time.

[0840] The arms and interventions are presented in Table 76 below:

TABLE 76
Arms and Interventions

| Arm | Intervention/Treatment |
|---|---|
| Experimental: DF6002 Monotherapy Dose | Biological: DF6002; DF6002 is a |
| Escalation; 3 + 3 dose escalation of | monovalent human interleukin-12 (IL12)- |
| subcutaneous DF6002 as monotherapy in | constant fragment (Fc) fusion protein that |
| patients with solid tumors. | binds to the IL12 receptor. |
| Experimental: DF6002 Monotherapy | Biological: DF6002; DF6002 is a |
| Expansion (Melanoma); Dose expansion of | monovalent human interleukin-12 (IL12)- |
| up to 40 patients with melanoma receiving | constant fragment (Fc) fusion protein that |
| subcutaneous DF6002 as monotherapy. | binds to the IL12 receptor. |
| Experimental: DF6002 Monotherapy | Biological: DF6002; DF6002 is a |
| Expansion (NSCLC); Dose expansion of up | monovalent human interleukin-12 (IL12)- |
| to 40 patients with non-small cell lung cancer | constant fragment (Fc) fusion protein that |
| receiving subcutaneous DF6002 as | binds to the IL12 receptor |
| monotherapy. | |
| Experimental: DF6002 In Combination with | Biological: DF6002 |
| Opdivo Escalation; 3 + 3 dose escalation of | DF6002 is a monovalent human interleukin- |
| subcutaneous DF6002 in combination with | 12 (IL12)-constant fragment (Fc) fusion |
| intravenous Opdivo. | protein that binds to the IL12 receptor. |
| | Biological: Nivolumab |
| | Nivolumab is a human immunoglobulin G4 |
| | (IgG4) monoclonal antibody, which binds to |
| | the programmed death-1 receptor (PD-1). |
| | Other Name: Opdivo |
| Experimental: DF6002 in Combination with | Biological: DF6002 |
| Opdivo Expansion (Melanoma) | DF6002 is a monovalent human interleukin- |
| Dose expansion of up to 40 patients with | 12 (IL12)-constant fragment (Fc) fusion |
| melanoma receiving subcutaneous DF6002 | protein that binds to the IL12 receptor. |
| in combination with intravenous Opdivo. | Biological: Nivolumab |
| | Nivolumab is a human immunoglobulin G4 |
| | (IgG4) monoclonal antibody, which binds to |
| | the programmed death-1 receptor (PD-1). |
| | Other Name: Opdivo |
| Experimental: DF6002 in Combination with | Biological: DF6002 |
| Opdivo Expansion (NSCLC) | DF6002 is a monovalent human interleukin- |
| Dose expansion of up to 40 patients with | 12 (IL12)-constant fragment (Fc) fusion |
| non-small cell lung cancer receiving | protein that binds to the IL12 receptor. |
| subcutaneous DF6002 in combination with | Biological: Nivolumab |
| intravenous Opdivo. | Nivolumab is a human immunoglobulin G4 |
| | (IgG4) monoclonal antibody, which binds to |
| | the programmed death-1 receptor (PD-1). |
| | Other Name: Opdivo |

[0841] The primary outcome measures include:

[0842] 1. Assessment of the number of dose limiting toxicities experienced on study with monotherapy DF6002 as defined per criteria in the study protocol [Time Frame: First 3 weeks on treatment for each subject.] To assess the number of adverse events experienced during treatment with monotherapy DF6002 that meet dose limiting toxicity criteria per the study protocol;

[0843] 2. Assessment of the number of dose limiting toxicities experienced on study with combination therapy of DF6002 and nivolumab as defined per criteria in the study protocol [Time Frame: First 3 weeks on treatment for each subject in the combination therapy cohort.] To assess the number of adverse events experienced during treatment with combination therapy of DF6002 and nivolumab that meet dose limiting toxicity criteria per the study protocol; and

[0844] 3. Assess overall response rate [Time Frame: Through 90 days after completion of the study, an average of 1 year.] To assess the Overall Response Rate (ORR) per RECIST version 1.1 criteria of patients in the Phase 2 expansion cohorts. The secondary outcome measures include: 1. Assess number of treatment emergent adverse events throughout study [Time Frame: Until 30 days after the last treatment of the last subject enrolled in the Phase 2 portion of the study.] Characterize the safety profile of DF6002 by assessing the number of adverse events occurring while on treatment with DF6002; 2. Determine serum concentrations of DF6002 at various timepoints [Time Frame: From start of treatment up through 28 days after last treatment] Concentration vs time of DF6002 will be measured using blood samples taken a various time points on study;

[0845] 4. Assess Duration of Response [Time Frame: From time of initiation of therapy until the date of first documented tumor progression, assessed up to 24 months] To assess duration of response using RECIST 1.1 criteria;

[0846] 5. Assess Best Overall Response [Time Frame: Through 90 days after completion of the study, an average of 1 year] To assess best overall response using RECIST 1.1 criteria;

[0847] 6. Assess Overall Survival [Time Frame: Time from enrollment in the study until death, measured up to 2 years after last treatment on study] To assess overall survival following treatment; and

[0848] 7. Assess Overall Response Rate [Time Frame: Time from enrollment in the study until up to 2 years after last treatment on study] To assess overall response rate according to Investigator judgment.

[0849] The inclusion criteria (General Phase 1 and Phase 1b) include: 1. Male or female patients aged ≥18 years; 2. Histologically or cytologically proven locally advanced or metastatic solid tumors, for which no standard therapy exists or standard therapy has failed among the following tumor types: melanoma, non-small cell lung cancer, small cell lung cancer, head and neck squamous cell, urothelial, gastric, esophageal, cervical, hepatocellular, merkel cell, cutaneous squamous cell carcinoma, renal cell, endometrial, triple-negative breast, ovarian, and prostate; 3. ECOG performance status of 0 or 1; 4. Clinical or radiological evidence of disease; 5. Adequate hematological, hepatic and renal function; 6. Resolution of toxic effect(s) of prior anti-cancer therapy to ≤Grade 1 (Patients with ≤Grade 2 neuropathy, ≤Grade 2 endocrinopathy or ≤Grade 2 alopecia are exceptions); and 7. Effective contraception for women of child-bearing potential as defined by World Health Organization guidelines for 1 “highly effective” method or 2 “effective” methods.

[0850] Additional Phase 1 Monotherapy and Phase 1b Combination With Nivolumab Expansion Inclusion Criteria include: 1. Has one of the following tumor types: melanoma, non-small cell lung cancer, or triple negative breast cancer; and 2. Agrees to undergo a pre-treatment biopsy and another biopsy while on treatment.

[0851] Expansion Inclusion Criteria specific to Melanoma include: 1. Histologically confirmed, unresectable Stage III or Stage IV melanoma, as specified in the American Joint Committee on Cancer staging system; 2. Participants with ocular or uveal melanoma are ineligible; 3. PD-L1 status must be documented if available; 4. BRAF (V600) mutation status must be known. Both BRAF-mutated and wild type participants are permitted in this cohort; 5. BRAF-mutated participants must have been treated with approved targeted therapies; 6. Must have documented progressive or recurrent disease on or after discontinuation of anti-PD-(L)1 therapy (administered as monotherapy or as part of a combination) as per RECIST 1.1 criteria; and 7. Participants who received anti-PD-(L)1 in the adjuvant setting must have documented progressive or recurrent disease on or within 6 months of discontinuation of anti-PD-(L)1 therapy (administered as monotherapy or as part of a combination) as per RECIST 1.1 criteria.

[0852] Expansion Inclusion Criteria specific to NSCLC include: 1. Histologically confirmed NSCLC meeting stage criteria for stage IIIB, stage IV, or recurrent disease; 2. Participants must have recurrent or progressive disease during or after platinum doublet-based chemotherapy or at least two prior lines of systemic therapy for advanced or metastatic disease OR Must have recurrent or progressive disease within 6 months after completing platinum-based chemotherapy for local disease; 3. Participants must have received and progressed on or after anti-PD-(L)1 therapy, if available; and 4. Status for actionable mutations (e.g., EGFR, ALK, ROS1, RET, etc.) must be known (when testing is available as per country/region standard of care practices); participants with actionable mutations must have received and progressed on, have been intolerant to, or not be a candidate for, standard tyrosine kinase inhibitors (as available per country/region standard of care practices).

[0853] Expansion Inclusion Criteria specific to TNBC include: 1. Histologically confirmed unresectable, locally advanced or metastatic triple negative breast cancer.PD-L1 status, HER2-negative, estrogen receptor-negative, and progesterone receptor-negative status must be evaluated by local institutions before enrolment per guidelines of the American Society of Clinical Oncology and the College of American Pathologists; 2. Patients must not have received an anti PD-1/PD-L1 for the treatment of the metastatic disease, but the administration of an anti PD-1/PD-L1 in the adjuvant setting is acceptable; 3. Patients must have received one line of chemotherapy for the treatment of their metastatic disease, and experience progression during or after that line of chemotherapy; and 4. Patients must have not received more than one line of chemotherapy for the treatment of their unresectable, recurrent or metastatic disease.

[0854] Inclusion Criteria for Phase 2 (General) include: 1. Male or female patients aged ≥18 years; 2. ECOG performance status of 0 or 1; 3. Clinical or radiological evidence of measurable disease; 4. Adequate hematological, hepatic and renal function; 5. Resolution of toxic effect(s) of prior anti-cancer therapy to ≤Grade 1. (Patients with ≤Grade 2 neuropathy, ≤Grade 2 endocrinopathy or ≤Grade 2 alopecia are exceptions); 6. Participants must have received and progressed on or after anti-PD-(L)1 therapy; and 7. Effective contraception for women of child-bearing potential as defined by World Health Organization guidelines for 1 “highly effective” method or 2 “effective” methods.

[0855] Additional Inclusion Criteria for Phase 2 (Advanced Melanoma Patients) include: 1. Participants who received anti-PD-(L)1 in the advanced/metastatic setting, must have documented progressive or recurrent disease on or within 3 months of discontinuation of anti-PD-(L)1 therapy; 2. Participants who received anti-PD-(L)1 in the adjuvant setting must have documented progressive or recurrent disease on or within 6 months of discontinuation of anti-PD-(L)1 therapy; 3. Disease progression was confirmed at least 4 weeks after the initial diagnosis of disease progression while receiving an anti PD-1 antibody; 4. BRAF mutation status must be known and treated with approved targeted therapies; 5. Received a BRAF inhibitor if the tumor carries a BRAF activating mutation and progressed after the last line of treatment; 6. Participants with ocular or uveal melanoma are ineligible; and 7. Confirmation of radiographic progression on prior anti-PD-(L)1 therapy is required with a scan confirming progression at least 4 weeks after the initial progression.

[0856] Additional Inclusion Criteria for Phase 2 (Non-small Cell Lung Cancer) include: 1. Participants must have recurrent or progressive disease during or after platinum doublet-based chemotherapy or at least two prior lines of systemic therapy for advanced or metastatic disease OR must have recurrent or progressive disease within 6 months after completing platinum-based chemotherapy for local disease; and 2. Status for actionable mutations must be known; participants with actionable mutations must have received and progressed on, have been intolerant to, or not be a candidate for, standard tyrosine kinase inhibitors.

[0857] Exclusion Criteria for All Patients (All Phases): 1. Prior treatment with rhIL2 or any recombinant long acting drug containing an IL2 moiety; 2. Concurrent anticancer treatment (with the exception of palliative bone directed radiotherapy), immune therapy, or cytokine therapy (except for erythropoietin), major surgery (excluding prior diagnostic biopsy), concurrent systemic therapy with steroids or other immunosuppressive agents, or use of any investigational drug within 28 days before the start of study treatment; 3. Previous malignant disease other than the current target malignancy within the last 3 years, with the exception of basal or squamous cell carcinoma of the skin, localized prostate cancer or cervical carcinoma in situ; 4. Rapidly progressive disease; 5. Any Grade 2 and higher neurological or pulmonary toxicity during a treatment with an anti-PD-1 or PD-L1 agent administered as a monotherapy; 6. Active or history of central nervous system (CNS) metastases unless all of the following criteria are met: a. CNS lesions are asymptomatic and previously treated; b. Patient does not require ongoing steroid treatment daily for replacement for adrenal insufficiency; c. Imaging demonstrates stability of disease 28 days from last treatment for CNS metastases; 7. Receipt of any organ transplantation, autologous or allogeneic stem-cell transplantation; 8. Significant acute or chronic infections, or active or latent hepatitis B or active hepatitis C; 9. Preexisting autoimmune disease needing treatment with systemic immunosuppressive agents for more than 28 days within the last 3 years, clinically relevant immunodeficiencies, or fever within 7 days of Day 1; 10. Known severe hypersensitivity reactions to monoclonal antibodies and any history of anaphylaxis, or uncontrolled asthma; 11. Serious cardiac illness or medical conditions; and 12. History of life-threatening toxicity related to prior immune therapy except those that are unlikely to re-occur with standard countermeasures.

### Exploratory Objectives

[0858] The exploratory objectives, both with DF hIL12-Fc si as monotherapy and in combination with Nivolumab, are to: evaluate changes from baseline in tumor and peripheral biomarkers, and the relationship to PK; assess the PK of Nivolumab (Phase 1b and Cohort 2C only); evaluate the activity of DF hIL12-Fc si in the Efficacy Expansion Cohorts Part (Phase 2) per Investigator assessment (ORR, DOR, CBR, and BOR, by RECIST); evaluate the association between tumor and peripheral biomarkers, and tumor response rate.

### Study Design Overview

[0859] This study is a Phase 1/2, open-label, dose-escalation study with a consecutive parallel-group efficacy expansion study, designed to determine the safety, tolerability, PK, pharmacodynamics, and preliminary anti-tumor activity of DF hIL12-Fc si as monotherapy and in combination with Nivolumab. A schematic diagram of the study design is shown in FIG. 52A (for monotherapy) and 52B (for combination therapy with Nivolumab).

[0860] The study consists of 3 parts: Phase 1: Dose-escalation as a monotherapy using a 3+3 design, with Phase 1 Cohort Expansion; Phase 1b: Dose-escalation as a combination with Nivolumab using a 3+3 design, with Phase 1b Cohort Expansion; Phase 2: Efficacy Expansion using a group sequential design.

[0861] DF hIL12-Fc si is evaluated as a monotherapy in Efficacy Expansion cohorts in the following indications: Cohort 2A: Advanced (unresectable or metastatic) melanoma; Cohort 2B: Advanced (unresectable or metastatic) renal cell carcinoma (RCC).

[0862] DF hIL12-Fc si is evaluated in combination with Nivolumab in an Efficacy Expansion cohort in the following indication: Cohort 2C: Advanced (unresectable or metastatic) urothelial carcinoma.

[0863] In each study phase, patients receive DF hIL12-Fc si on Day 1 every 4 weeks (Q4W). Patients receive DF hIL12-Fc si until confirmed progressive disease (PD), unacceptable toxicity (i.e., dose-limiting toxicity [DLT]), or any reason for withdrawal from the study or Investigational Medicinal Product (IMP) occurs.

Phase 1 Dose Escalation DF hIL12-Fc si Monotherapy

[0864] The Phase 1 Dose-escalation Phase of the study is designed to determine the dose-limiting toxicities (DLTs) and maximum tolerated dose (MTD) of DF hIL12-Fc si as monotherapy using a standard 3+3 design.

[0865] The decision to escalate to the next dose level (DL) is based on safety assessments after all patients of a cohort have had safety evaluations performed through Cycle 1, Day 21 (C₁D21), unless due to DLT. In order to assess the safety of DF hIL12-Fc si, a Safety Monitoring Committee (SMC), responsible for dose-escalation decisions, is established.

[0866] After the safety of Dose Level “n” has been established, the SMC has the option to permit enrollment in the Phase I expansion cohort up to that dose level; no more than 50 patients can be enrolled by this process.

[0867] The MTD is defined as the highest DL at which ≤1 patient of 6 evaluable patients experiences a DLT.

Phase 1b: Dose-Escalation as a Combination with Nivolumab

[0868] The Phase 1b Dose-escalation Phase of the study is designed to determine the DLTs and MTD of DF hIL12-Fc si when given in combination with nivolumab, using a standard 3+3 design, as described for Phase 1.

[0869] Nivolumab is administered once every 4 weeks (on Day 1 of each cycle) per its U.S. package insert. The administration of nivolumab precedes that of DF hIL12-Fc si.

[0870] DF hIL12-Fc si dose levels tested in combination with Nivolumab are the same as those tested as a monotherapy.

[0871] Phase 1b starts after the SMC has established the safety of DL2 monotherapy (defined as the agreement to initiate enrollment into DL3). Phase 1b starts at a DF hIL12-Fc si dose at least 1 level below the safe dose established with monotherapy at the time the Phase 1b is initiated.

[0872] After the safety of Dose Level “n” has been established, the SMC has the option to permit enrollment in the Phase 1b Expansion Cohort; no more than 50 patients can be enrolled by this process across dose levels.

### Phase 2 Efficacy Expansion

[0873] The following tumor types are enrolled at the recommended phase 2 dose (RP2D): As a monotherapy: Cohort 2A: Advanced (unresectable or metastatic) melanoma; Cohort 2B: Advanced (unresectable or metastatic) renal cell carcinoma. In combination with Nivolumab, Cohort 2C: Advanced (unresectable or metastatic) urothelial carcinoma.

### Safety Oversight

[0874] Male or female patients aged ≥18 years with an Eastern Cooperative Oncology Group (ECOG) performance status of 0 or 1 at study entry and an estimated life expectancy of at least 3 months are enrolled. Key inclusion criteria in each study phase/cohort are as follows: Dose-Escalation cohorts in Phase 1/1b: histologically or cytologically proven locally advanced or metastatic solid tumors for which no standard therapy exists or for which standard therapy has failed in the following indications: melanoma, non-small cell lung (NSCLC), small cell lung, head and neck squamous cell, urothelial, gastric, esophageal, cervical, hepatocellular, merkel cell, cutaneous squamous cell carcinoma, renal cell, endometrial, triple negative breast (TNBC), ovarian, and prostate cancers; clinical or radiological evidence of disease.

Dose Expansion Cohorts in Phase 1/1b: histologically or cytologically proven locally advanced or metastatic solid tumors for which no standard therapy exists or for which standard therapy has failed; Has measurable disease, as determined by the Investigator using the Response Evaluation Criteria for Solid Tumors (RECIST), version 1.1.

### Cohort 2A

[0875] Patients with advanced melanoma who: received treatment with an anti-programmed cell death protein 1 (PD-1) antibody for at least 6 weeks; have a confirmation of PD at least 4 weeks after the initial diagnosis of PD while receiving an anti PD-1 is made. Confirmation of PD can be based on radiological or clinical observations; must have received a BRAF inhibitor if the tumor carries a BRAF activating mutation and have progressed after the last line of treatment.

### Cohort 2B

[0876] Patients with advanced RCC who: have any clear cell histology component; received treatment with an anti PD-1/PD-L1 antibody and an anti-vascular endothelial growth factor therapy as a monotherapy or in combination; received ≤3 prior lines of therapy.

### Cohort 2C

[0877] Patients with advanced urothelial carcinoma who: have histologically or cytologically documented locally advanced or metastatic transitional cell carcinoma of the urothelium (including renal pelvis, ureters, urinary urothelial, urethra); have received one (and no more than one) platinum-containing regimen (e.g., platinum plus another agent such as gemcitabine, methotrexate, vinblastine, doxorubicin, etc.) for inoperable locally advanced or metastatic urothelial carcinoma with radiographic progression or with recurrence within 6 months after the last administration of a platinum-containing regimen as an adjuvant, which would be considered failure of a first-line, platinum-containing regimen; have received no more than 2 lines of therapy (including the platinum-containing regimen) for the treatment of the metastatic disease; have not received treatment with a checkpoint inhibitor (CPI) (i.e., anti-PD-1 or anti-PD-L1 as a monotherapy or in combination with a platinum-based chemotherapy.

[0878] Dose Mode of Administration Dosing Schedule

[0879] DF hIL12-Fc si is administered as a subcutaneous (SC) injection Q4W (i.e., on Day 1 of each cycle) in both monotherapy and combination cohorts. Patients receive the drug SC in a volume of not more than 1 mL in a maximum of 2 injection sites. The second administration is completed within 10 minutes after the completion of the first administration, if applicable.

[0880] In Phase 1/1b, patients are hospitalized for the night following the first administration of DF hIL12-Fc si.

[0881] The DF hIL12-Fc si DLs (μg/kg) are as follows in Table 77.

TABLE 77
DF hIL12-Fc si DLs (μg/kg)

| | DL1 | DL2 | DL3 | DL4 | DL5 | DL6 | DL7 | DL8 | DL9 | DL10 |
|---|---|---|---|---|---|---|---|---|---|---|
| Dose of DF | 0.05 | 0.10 | 0.20 | 0.40 | 0.60 | 0.80 | 1.00 | 1.20 | 1.40 | 1.75 |
| hIL12-Fc si | | | | | | | | | | |
| (μ/kg) | | | | | | | | | | |
| Equivalent | 0.021 | 0.053 | 0.105 | 0.211 | 0.316 | 0.421 | 0.526 | 0.632 | 0.737 | 0.921 |
| IL12 | | | | | | | | | | |
| (μg/kg) | | | | | | | | | | |

[0882] The dose of DF hIL12-Fc si is calculated based on the weight of the patient at baseline. The patient's calculated dose is only recalculated if the patient's weight changes by 10% or more since the time of their last dose calculation.

[0883] In Phase 1b and Cohort 2C, Nivolumab is administered at a dose of 480 mg, once every 4 weeks (Q4W) via intravenous (IV) infusion, in accordance with the package insert. The administration of nivolumab precedes that of DF hIL12-Fc si. DF hIL12-Fc si is administered within 1 hour after the completion of the administration of nivolumab.

### Efficacy Expansion as a Monotherapy (Cohorts 2A and 2B)

[0884] The primary endpoint for this phase is the ORR. For each of these cohorts, the null hypothesis is that the objective response rate (ORR) does not exceed 5% (H0: ORR<5%) and the alternative hypothesis is that the ORR is greater than 5% (H1: ORR≥5%).

[0885] The target ORR of DF hIL12-Fc si as a monotherapy is 20%. It is expected to enroll 40 patients for each of these cohorts (i.e., approximately 80 patients in total).

[0886] Using a group sequential design, with 40 patients in each of the indication cohorts, the efficacy cohort provides ˜90% study power to detect a 15% difference at a 1-sided overall type I error rate of 0.025, assuming the target ORR of 20% for DF hIL12-Fc si.

[0887] For each of Cohorts 2A and 2B, a futility interim analysis, with Lan-DeMets O'Brien Fleming boundary, is planned at 50% information fraction (i.e., at ˜20 patients).

Efficacy Expansion in Combination with Nivolumab (Cohort 2C)

[0888] The Phase 2 portion for efficacy expansion in combination with nivolumab determines the clinical activity of DF hIL12-Fc si in combination in patients with UBC who have progressed after one line of platinum-based chemotherapy.

[0889] The study enrolls 40 patients so that the observation of 14 responses (CR or PR) out of the 40 patients enroll will lead to a 95% CI (0.206; 0.517) that excludes the value of the percentage of responses reported for nivolumab in a similar population, that was enrolled in Checkmate 275. In that study, the ORR was 19.6% (Sharma P, Retz M, Siefker-Radtke A, Baron A, Necchi A, Bedke J, et al. Nivolumab in metastatic urotheilal carcinoma after platin therapy (CheckMate 275): a multicentre, single-arm phase 2 trial. Lancet Oncol. 2017 Jan. 25; S1470-2045(17):30065-7).

### Exploratory Biomarkers

### Peripheral Biomarkers

[0890] Peripheral biomarkers are assessed in the periphery in all patients, including: cellular parameters: peripheral blood mononuclear cell (PBMCs) for immunophenotyping (IPT) by flow cytometry; soluble factors: Cytokines and chemokines in serum samples; ex vivo IL12 response assay: PBMCs for ex vivo stimulation followed by analysis of IFNγ production; circulating tumor (ct) deoxyribonucleic acid (DNA).—Gene expression profile performed using Nanostring: total RNA isolated from peripheral blood collected during screening and on C1D15; IPT assessments are performed on PBMCs derived from whole blood samples collected 2 hours prior to administration of DF hIL12-Fc si C1 through C3 and at each of the following study visits: C1D3, C1D8, C2D8, and C3D3; Soluble factors are determined in serum samples collected within 2 hours prior to DF hIL12-Fc si administration on D1 of each treatment cycle, and on C1D2, C1D3, C1D5, C1D8, C1D15, C2D3, C3D3, and C4D3, and at the EOT and SFU visits.

[0891] In order to complete all the assessments on tumor materials, blood (e.g., whole blood, plasma, and serum samples), is collected from patients.

### Biomarkers Derived From Tumor Tissue

[0892] Tissue derived biomarkers are evaluated on the pre-treatment and on treatment biopsies in patients participating in the Dose-escalation phase (optional biopsies), the Phase 1/1b Expansion Cohorts part (mandatory biopsies), and the Phase 2 Efficacy Expansion Cohorts phase (mandatory biopsies).

[0893] A panel of putative markers including molecular, soluble and cellular markers is analyzed at baseline from archived tumor tissue (or fresh tumor biopsy, if available), whole blood, and serum samples to investigate a possible correlation between clinical efficacy and analyzed markers.

[0894] For patients enrolled in the Dose-escalation Phase, the level of PD-L1 expression is determined using a commercially available kit (Dako PD-L1 IHC 22C3 pharmDx) and analysis of CD3 positivity (T cell infiltration) is determined by immunohistochemistry (IHC).

[0895] For patients enrolled in the Phase 1/1b Expansion Cohorts and the Efficacy Expansion Cohorts, fresh mandatory tumor biopsies are performed at Screening (i.e., within 30 days before first study drug dose) and at pre-specified time points during the treatment period.

[0896] Other biomarkers that are assessed include: frequency and localization of tumor-infiltrated leukocytes (e.g., CD8, CD4 T-cells, Treg, NK cells, macrophage [M1/2 profile] by IHC or IF), gene expression profile, and pharmacogenomics (PGx).

[0897] Germline DNA may be investigated on DNA extracted from whole blood and/or archival tumors. This extracted DNA is used for Whole Exome Sequencing and/or genotyping. For this purpose, an additional 6 mL of whole blood is collected at baseline (i.e., prior to the first administration of study treatment) for all indications; no additional tumor samples are needed because a part of the archived tumor sample is used for the extraction of DNA to study tumor genetics if required.

### INCORPORATION BY REFERENCE

[0898] The entire disclosure of each of the patent documents and scientific articles referred to herein is incorporated by reference for all purposes.

### EQUIVALENTS

[0899] The invention may be embodied in other specific forms without departing from the spirit or essential characteristics thereof. The foregoing embodiments are therefore to be considered in all respects illustrative rather than limiting the invention described herein. Scope of the invention is thus indicated by the appended claims rather than by the foregoing description, and all changes that come within the meaning and range of equivalency of the claims are intended to be embraced therein.

What is claimed is:

1. A pharmaceutical formulation comprising:
(a) a heterodimeric Fc-fused protein comprising:
(i) a first polypeptide comprising a first antibody Fc domain polypeptide and a first subunit of a multisubunit cytokine; and
(ii) a second polypeptide comprising a second antibody Fc domain polypeptide and a second, different subunit of the multisubunit cytokine,
(b) citrate;
(c) a sugar;
(d) a sugar alcohol; and
(e) a non-ionic surfactant,
at pH 6.0 to 7.0,
wherein the first and second antibody Fc domain polypeptides each comprise different mutations promoting heterodimerization, and
wherein the first subunit and second, different subunit of the multisubunit cytokine are bound to each other.

2. The pharmaceutical formulation of claim 1, wherein the first and/or second antibody Fc domain polypeptides comprise one or more mutation(s) that reduce(s) an effector function of an Fc.

3. The pharmaceutical formulation of claim 1 or 2, wherein the concentration of citrate in the pharmaceutical formulation is about 10 mM to about 30 mM.

4. The pharmaceutical formulation of claim 3, wherein the concentration of citrate in the pharmaceutical formulation is about 20 mM.

5. The pharmaceutical formulation of any one of claims 1-4, wherein the concentration of the sugar in the pharmaceutical formulation is about 3% to about 12% (w/v).

6. The pharmaceutical formulation of claim 5, wherein the concentration of the sugar in the pharmaceutical formulation is about 6% (w/v).

7. The pharmaceutical formulation of claim 5 or 6, wherein the sugar is a disaccharide.

8. The pharmaceutical formulation of claim 7, wherein the disaccharide is sucrose.

9. The pharmaceutical formulation of any one of claims 1-8, wherein the concentration of the sugar alcohol in the pharmaceutical formulation is between about 0.5% to about 6% (w/v).

10. The pharmaceutical formulation of claim 9, wherein the concentration of the sugar alcohol in the pharmaceutical formulation is about 1% (w/v).

11. The pharmaceutical formulation of any one of claims 1-10, wherein the sugar alcohol is derived from a monosaccharide.

12. The pharmaceutical formulation of claim 11, wherein the sugar alcohol is mannitol.

13. The pharmaceutical formulation of any one of claims 1-12, wherein the concentration of the non-ionic surfactant in the pharmaceutical formulation is between about 0.005% to about 0.02% (w/v).

14. The pharmaceutical formulation of claim 13, wherein the concentration of polysorbate 80 in the pharmaceutical formulation is about 0.01% (w/v).

15. The pharmaceutical formulation of claim 13 or 14 wherein the non-ionic surfactant is a polysorbate.

16. The pharmaceutical formulation of claim 15, wherein the polysorbate is polysorbate 80.

17. The pharmaceutical formulation of any one of claims 1-16, wherein the pH is between about 6.1 and about 6.9.

18. The pharmaceutical formulation of claim 17, wherein the pH is between about 6.2 and about 6.8.

19. The pharmaceutical formulation of claim 18, wherein the pH is between about 6.3 and about 6.7.

20. The pharmaceutical formulation of claim 19, wherein the pH is between about 6.4 and about 6.6.

21. The pharmaceutical formulation of claim 20, wherein the pH is about 6.5.

22. The pharmaceutical formulation of any one of claims 1-21, further comprising water.

23. The pharmaceutical formulation of claim 22, wherein the water is Water for Injection, USP.

24. The pharmaceutical formulation of any one of claims 1-23, wherein the pharmaceutical formulation comprises a bulk concentration of heterodimeric Fc-fused protein of about 1 g/L to about 10 g/L.

25. The pharmaceutical formulation of claim 24, wherein the pharmaceutical formulation comprises a bulk concentration of heterodimeric Fc-fused protein of about 2 g/L to about 8 g/L.

26. The pharmaceutical formulation of claim 25, wherein the pharmaceutical formulation comprises a bulk concentration of heterodimeric Fc-fused protein of about 4 g/L to about 6 g/L.

27. The pharmaceutical formulation of claim 26, wherein the pharmaceutical formulation comprises a bulk concentration of heterodimeric Fc-fused protein of about about 5 g/L.

28. The pharmaceutical formulation of any one of claims 1-27, wherein the pharmaceutical formulation comprises a concentration of the protein for administration of about 0.5 g/L to about 1.5 g/L.

29. The pharmaceutical formulation of claim 28, wherein the pharmaceutical formulation comprises a concentration of the protein for administration of about 0.75 g/L to about 1.25 g/L.

30. The pharmaceutical formulation of claim 29, wherein the pharmaceutical formulation comprises a concentration of the protein for administration of about 1 g/L.

31. The pharmaceutical formulation of any one of 1-30, wherein the formulation is designed to be stored at a temperature between about 2° C. and about 8° C.

32. The pharmaceutical formulation of any one of claims 1-31, wherein the pharmaceutical formulation is a clear, colorless solution and free of visible particulates.

33. The pharmaceutical formulation of any one of claims 1-32, wherein the formulation has a thermal stability profile as defined by:
(a) a Tₘ₁ of greater than about 60° C., greater than about 61° C., greater than about 62° C., greater than about 63° C., greater than about 64° C., greater than about 65° C., or greater than about 66° C.; and/or
(b) a Tₘ₂ of greater than about 70° C., greater than about 71° C., greater than about 72° C., greater than about 73° C., greater than about 74° C., greater than about 75° C., greater than about 76° C., or greater than about 77° C.,
as measured by differential scanning fluorimetry.

34. The pharmaceutical formulation of claim 33, wherein the formulation has a thermal stability profile as defined by a Tₘ₁ of about 67.0° C. and a Tₘ₂ of about 77.3° C.

35. The pharmaceutical formulation of claim 34, wherein the thermal stability profile of the pharmaceutical formulation, as defined by Tₘ₁ and/or Tₘ₂ is changed by less than about 2° C. or less than about 1° C. when the pharmaceutical formulation is incubated for 1 week at 50° C., as compared to the same pharmaceutical formulation that is incubated for 1 week at 5° C., as measured by differential scanning fluorimetry.

36. The pharmaceutical formulation of any one of 1-35, wherein the formulation has a thermal stability profile as defined by a T_{agg} of greater than about 60° C., greater than about 61° C., greater than about 62° C., greater than about 63° C., greater than about 64° C., greater than about 65° C., greater than about 66° C., or greater than about 67° C., as measured by differential scanning fluorimetry.

37. The pharmaceutical formulation of claim 36, wherein the thermal stability profile of the pharmaceutical formulation, as defined by T_{agg} is changed by less than about 2° C. or less than about 1° C. when the pharmaceutical formulation is incubated for 1 week at 50° C., as compared to the same pharmaceutical formulation that is incubated for 1 week at 5° C., as measured by differential scanning fluorimetry.

38. The pharmaceutical formulation of any one of claims 1-37, wherein the pH of the pharmaceutical formulation does not change by more than about 0.2 or about 0.1 in pH value after the pharmaceutical formulation is incubated for 1 week at 5° C.

39. The pharmaceutical formulation of any one of claims 1-38, wherein the pH of the pharmaceutical formulation does not change by more than about 0.2 or about 0.1 in pH value after the pharmaceutical formulation is incubated for 1 week at 50° C.

40. The pharmaceutical formulation of any one of claims 1-39, wherein the heterodimeric Fc-fused protein in the pharmaceutical formulation has a Z-average hydrodynamic diameter of less than about 15 nm, less than about 14 nm, less than about 13 nm, or less than about 12 nm, as measured by dynamic light scattering at 25° C.

41. The pharmaceutical formulation of claim 40, wherein the heterodimeric Fc-fused protein in the pharmaceutical formulation has a Z-average hydrodynamic diameter of about 11.6 nm.

42. The pharmaceutical formulation of any one of claims 1-41, wherein the heterodimeric Fc-fused protein in the pharmaceutical formulation has a Z-average hydrodynamic diameter of less than about 20 nm, less than about 19 nm, less than about 18 nm, less than about 17 nm, less than about 16 nm, or less than about 15 nm, as measured by dynamic light scattering at 25° C., after the pharmaceutical formulation is incubated for 2 weeks at 50° C.

43. The pharmaceutical formulation of claim 42, wherein the heterodimeric Fc-fused protein in the pharmaceutical formulation has a Z-average hydrodynamic diameter of about 14.4 nm.

44. The pharmaceutical formulation of any one of claims 1-43, wherein the heterodimeric Fc-fused protein in the pharmaceutical formulation has a Z-average hydrodynamic diameter of less than about 20 nm, less than about 19 nm, less than about 18 nm, less than about 17 nm, or less than about 16 nm, as measured by dynamic light scattering at 25° C., after the pharmaceutical formulation is subjected to five freeze thaw cycles.

45. The pharmaceutical formulation of claim 44, wherein the heterodimeric Fc-fused protein in the pharmaceutical formulation has a Z-average hydrodynamic diameter of about 15.3 nm.

46. The pharmaceutical formulation of any one of claims 1-45, wherein the polydispersity index of the heterodimeric Fc-fused protein in the pharmaceutical formulation is less than about 0.30, less than about 0.29, less than about 0.28, or less than about 0.27, as measured by dynamic light scattering at 25° C.

47. The pharmaceutical formulation of any one of claims 1-46, wherein the polydispersity index of the heterodimeric Fc-fused protein in the pharmaceutical formulation is about 0.26.

48. The pharmaceutical formulation of any one of claims 1-47, wherein the polydispersity index of the heterodimeric Fc-fused protein in the pharmaceutical formulation is less than about 0.30, less than about 0.29, less than about 0.28, less than about 0.27, or less than about 0.26, as measured by dynamic light scattering at 25° C., after the pharmaceutical formulation is incubated for 2 weeks at 50° C.

49. The pharmaceutical formulation of any one of claims 1-48, wherein the polydispersity index of the heterodimeric Fc-fused protein in the pharmaceutical formulation is about 0.25.

50. The pharmaceutical formulation of any one of claims 1-49, wherein the polydispersity index of the heterodimeric Fc-fused protein in the pharmaceutical formulation is less than about 0.40, less than about 0.35, or less than about 0.34, as measured by dynamic light scattering at 25° C., after the pharmaceutical formulation is subjected to five freeze thaw cycles.

51. The pharmaceutical formulation of any one of claims 1-50, wherein the polydispersity index of the heterodimeric Fc-fused protein in the pharmaceutical formulation is about 0.33.

52. The pharmaceutical formulation of any one of claims 1-51, wherein the purity profile of the pharmaceutical formulation, as measured by the area of the main peak as a percentage of total detected area in a SEC-HPLC analysis, is greater than about 90%, greater than about 91%, greater than about 92%, greater than about 93%, greater than about 94%, greater than about 95%, greater than about 96%, greater than about 97%, greater than about 98%, or greater than about 99%.

53. The pharmaceutical formulation of claim 52, wherein the purity profile of the pharmaceutical formulation, as measured by the area of the main peak as a percentage of total detected area in a SEC-HPLC analysis, is about 99.0%.

54. The pharmaceutical formulation of any one of claims 1-53, wherein the purity profile of the pharmaceutical formulation, as measured by the area of the main peak as a percentage of total detected area in a SEC-HPLC analysis, is greater than about 75%, greater than about 80%, greater than about 81%, greater than about 82%, greater than about 83%, greater than about 84%, or greater than about 85%, after the pharmaceutical formulation is incubated for 2 weeks at 50° C.

55. The pharmaceutical formulation of claim 54, wherein the purity profile of the pharmaceutical formulation, as measured by the area of the main peak as a percentage of total detected area in a SEC-HPLC analysis, is about 85.2%.

56. The pharmaceutical formulation of any one of claims 1-55, wherein the purity profile of the pharmaceutical formulation, as measured by the area of the main peak as a percentage of total detected area in a SEC-HPLC analysis, is greater than about 90%, greater than about 91%, greater than about 92%, greater than about 93%, greater than about 94%, greater than about 95%, greater than about 96%, greater than about 97%, or greater than about 98%, after the pharmaceutical formulation is subjected to five freeze thaw cycles.

57. The pharmaceutical formulation of claim 56, wherein the purity profile of the pharmaceutical formulation, as measured by the area of the main peak as a percentage of total detected area in a SEC-HPLC analysis, is about 98.9%.

58. A method comprising administering to a subject in need thereof, the pharmaceutical formulation of any one of claims 1-57, as a single-dose therapy.

59. A method comprising administering to a subject in need thereof, the pharmaceutical formulation of any one of claims 1-57, in a multiple-dose therapy at an interval of at least three weeks between the doses or at least four weeks between the doses.

60. The method of claim 59, wherein the pharmaceutical formulation is administered to the subject once every three weeks.

61. The method of claim 59, wherein the pharmaceutical formulation is administered to the subject once every four weeks.

62. The method of claim 59, wherein the pharmaceutical formulation is administered to the subject once every six weeks.

63. The method of any one of claims 59-62, further comprising stopping the multi-dose therapy if the subject develops progressive disease, unacceptable toxicity, or meets a criterion for withdrawal.

64. The method of any one of claims 59-63, wherein if the subject experiences a complete response (CR) during the multi-dose therapy, then the multi-dose therapy is further administered for at least 12 months after the confirmation of the complete response.

65. The method of claim 64, wherein the total duration of the multi-dose therapy is equal to or less than 24 months.

66. The method of claim 64, wherein the total treatment duration is greater than 24 months.

67. The method of any one of claims 58-66, wherein the pharmaceutical formulation is administered by subcutaneous injection.

68. The method of any one of claims 58-67, wherein the pharmaceutical formulation is administered to the subject in an amount sufficient to provide the heterodimeric Fc-fused protein at a dosage of between about 0.05 μg/kg to about 1.75 μg/kg, based on the subject's weight.

69. The method of any one of claims 58-68, wherein the pharmaceutical formulation is administered to the subject in an amount sufficient to provide the heterodimeric Fc-fused protein at a dosage of about 0.05 μg/kg, about 0.10 μg/kg, about 0.20 μg/kg, about 0.40 μg/kg, about 0.60 μg/kg, about 0.80 μg/kg, about 1.00 μg/kg, about 1.20 μg/kg, about 1.40 μg/kg, or about 1.75 μg/kg, based on the subject's weight.

70. The method of any one of claims 58-67, wherein the pharmaceutical formulation is administered to the subject in an amount sufficient to provide the heterodimeric Fc-fused protein at a dosage of greater than 0.00 μg/kg and less than about 0.05 μg/kg, based on the subject's weight.

71. The method of any one of claims 58-67, wherein the pharmaceutical formulation is administered to the subject in an amount sufficient to provide the heterodimeric Fc-fused protein at a dosage of greater than about 1.75 μg/kg, based on the subject's weight.

72. The method of any one of claims 58-71, wherein the subject has cancer.

73. The method of claim 72, wherein the subject has a locally advanced or metastatic solid tumor.

74. The method of claim 72 or 73, wherein the presence of the cancer in the subject is confirmed using the Response Evaluation Criteria for Solid Tumors (RECIST), version 1.1.

75. The method of any one of claims 72-74, wherein the cancer is selected from the group consisting of: melanoma, non-small cell lung cancer (NSCLC), small cell lung cancer (SCLC), head and neck squamous cell carcinoma (HNSCC), classical Hodgkin lymphoma, primary mediastinal large B-Cell lymphoma, bladder cancer, urothelial carcinoma, micro-satellite instability high cancer, colorectal cancer, gastric cancer, oesophageal cancer, cervical cancer, hepatocellular carcinoma, Merkel cell carcinoma, renal cell carcinoma (RCC), endometrial carcinoma, cutaneous T cell lymphoma, and triple negative breast cancer.

76. The method of any one of claims 72-75, wherein the subject is anti-PD-1 refractory.

77. The method of claim 75, wherein the subject has melanoma.

78. The method of claim 77, wherein the subject has previously been treated with an anti-PD-1 antibody for at least 6 weeks.

79. The method of claim 78, wherein the subject has been confirmed of progression of disease at least 4 weeks after the initial diagnosis of progression of disease while receiving an anti-PD-1 antibody.

80. The method of claim 79, wherein progression of disease is confirmed by radiological or clinical observation.

81. The method of claim 77, wherein, if the subject has a tumor comprising a BRAF activating mutation, then the subject has previously been treated with a BRAF inhibitor.

82. The method of claim 75, wherein the subject has RCC.

83. The method of claim 82, wherein the RCC has clear cell histology.

84. The method of claim 82, wherein the patient has previously been treated with an anti-PD-1/PD-L1 antibody and/or an anti-vascular endothelial growth factor therapy.

85. The method of claim 82, wherein the subject has previously received three or fewer lines of therapy.

86. The method of claim 75, wherein the subject has urothelial carcinoma.

87. The method of claim 86, wherein the subject has locally advanced or metastatic transitional cell carcinoma of the urothelium.

88. The method of claim 86, wherein the subject has previously been treated with a single treatment comprising a platinum-containing regimen and has shown radiographic progression recurrence within 6 months after the last administration of the platinum-containing regimen.

89. The method of claim 86, wherein the subject has previously received two or less lines of therapy.

90. The method of claim 86, wherein the subject has not previously received a checkpoint inhibitor (e.g., anti-PD-1 or anti-PD-L1 antibody) therapy as a monotherapy or in combination with a platinum based chemotherapy.

91. The method of any one of claims 58-90, wherein the pharmaceutical formulation is administered to the subject as a monotherapy.

92. The method of any one of claims 58-90, wherein the pharmaceutical formulation is administered to the subject as a combination therapy.

93. The method of claim 92, further comprising administering to the subject an anti-PD-1 antibody.

94. The method of claim 93, wherein the anti-PD-1 antibody is pembrolizumab.

95. The method of claim 94, wherein pembrolizumab is administered intravenously.

96. The method of claim 94 or 95, wherein pembrolizumab is administered at a dose of 200 mg.

97. The method of any one of claims 94-96, wherein administration of pembrolizumab precedes each administration of the pharmaceutical formulation.

98. The method of claim 97, wherein the pharmaceutical formulation is administered within 1 hour after completion of administration of pembrolizumab.

99. The method of claim 92, wherein the anti-PD-1 antibody is nivolumab.

100. The method of claim 99, wherein nivolumab is administered intravenously.

101. The method of claim 99 or 100, wherein nivolumab is administered at a dose of 480 mg.

102. The method of any one of claims 99-101, wherein administration of nivolumab precedes each administration of the pharmaceutical formulation.

103. The method of claim 102, wherein the pharmaceutical formulation is administered within 1 hour after completion of administration of nivolumab.

104. The method of any one of claims 99-103, wherein the cancer is selected from the group consisting of: melanoma, NSCLC, SCLC, RCC, classical Hodgkin lymphoma, HNSCC, urothelial carcinoma, colorectal cancer, hepatocellular carcinoma, bladder cancer, and oesophageal cancer.

105. The method of claim 104, wherein the cancer is melanoma.

106. The method of claim 105, wherein the melanoma is unresectable.

107. The method of claim 104, wherein the cancer is colorectal cancer.

108. The method of claim 107, wherein the colorectal cancer is microsatellite instability-high (MSI-H) or mismatch repair deficient metastatic (dMMR) colorectal cancer.

109. The method of any one of claims 92-98, further comprising performing a surgical intervention to lyse cancer cells, remove a tumor, or debulk a tumor in the subject.

110. The method of claim 109, wherein the surgical intervention comprises cryotherapy.

111. The method of claim 109, wherein the surgical intervention comprises hyperthermic therapy.

112. The method of claim 109, wherein the surgical intervention comprises administering to the subject a radiotherapy.

113. The method of claim 112, wherein the radiotherapy is a stereotactic body radiation therapy (SBRT).

114. The method of any one of claims 92-113, further comprising administering to the subject an NK cell-targeting therapy.

115. The method of claim 114, wherein the subject is administered a multi-specific binding protein.

116. The method of any one of claims 92-115, further comprising administering to the subject a chimeric antigen receptor therapy.

117. The method of any one of claims 92-116, further comprising administering to the subject a cytokine therapy.

118. The method of any one of claims 92-117, further comprising administering to the subject an innate immune system agonist therapy.

119. The method of any one of claims 92-118, further comprising administering to the subject a chemotherapy.

120. The method of any one of claims 92-119, further comprising administering to the subject a targeted antigen therapy.

121. The method of any one of claims 92-120, further comprising administering to the subject an oncolytic virus therapy.

122. A method of detecting toxicity in a subject receiving a pharmaceutical formulation comprising measuring the concentration of C-reactive protein (CRP) in the subject's blood, wherein the pharmaceutical formulation comprises a heterodimeric Fc-fused protein and a pharmaceutically acceptable carrier, and wherein the heterodimeric Fc-fused protein comprises a first Fc region and a second Fc region of an immunoglobulin Fc (fragment crystallizable) pair and the p40 and p35 subunits of IL-12, wherein the p40 and p35 subunits of IL-12 are linked separately to the first Fc region and the second Fc region, or to the second Fc region and the first Fc region, respectively, wherein the p40 and p35 subunits are each linked to the N-terminus or C-terminus of the Fc regions, and wherein CH3 domains of the first Fc region and the second Fc region each comprise one or more mutations promoting heterodimerization.

123. The method of claim 122, wherein
(1) if the CRP concentration in the subject's blood is higher than a threshold CRP concentration, then the subject is identified as being at risk for developing an adverse drug reaction; and
(2) if the CRP concentration in the subject's blood is about the same or lower than the threshold C-reactive protein concentration, the subject is not identified as being at risk for developing an adverse drug reaction.

124. The method of claim 122, wherein if the CRP concentration in the subject's blood is higher than the threshold CRP concentration, then (1) the administration of the pharmaceutical formulation is paused; (2) the heterodimeric Fc-fused protein is administered at a lower dose; or
(3) a remedial action is taken to reduce or alleviate the formulation's toxicity effects in the subject.

125. The pharmaceutical formulation of any one of claims 1-57 or the method of any one of claims 58-124, wherein the first and second antibody Fe domain polypeptides are human IgG1 Fc domain polypeptides.

126. The pharmaceutical formulation or the method of claim 125, wherein the multisubunit cytokine is a human IL12.

127. The pharmaceutical formulation or the method of claim 126, wherein the human IgG1 Fc domain polypeptides comprise one or more mutation(s) that reduce(s) an effector function of an Fc.

128. The pharmaceutical formulation or the method of claim 127, wherein the first and second antibody Fe domain polypeptides comprise mutations selected from L234A, L235A or L235E, G237A, P329A, A330S, and P331S, numbered according to the EU numbering system.

129. The pharmaceutical formulation or the method of claim 128, wherein the first and second antibody Fc domain polypeptides each comprise mutations L234A, L235A, and P329A.

130. The pharmaceutical formulation or the method of claim 129, wherein the first subunit of a multisubunit cytokine is a p40 subunit of IL12 and the second subunit of a multisubunit cytokine is a p35 subunit of IL12.

131. The pharmaceutical formulation or the method of claim 130, wherein the first subunit of a multisubunit cytokine comprises the amino acid sequence of SEQ ID NO: 127 and the second subunit of a multisubunit cytokine comprises the amino acid sequence of SEQ ID NO: 128.

132. The pharmaceutical formulation or the method of claim 131, wherein the second subunit of a multisubunit cytokine is fused to the second antibody Fc domain by a linker comprising the amino acid sequence of SEQ ID NO: 108.

133. The pharmaceutical formulation or the method of claim 132, wherein
(a) the first antibody Fc domain comprises mutations L234A, L235A, P329A, Y349C, K360E, and K409W, and
(b) the second antibody Fc domain comprises mutations L234A, L235A, P329A, Q347R, S354C, D399V, and F405T.

134. The pharmaceutical formulation or the method of claim 133, wherein
(a) the first antibody Fc domain comprises the amino acid sequence of SEQ ID NO:215, and
(b) the second antibody Fc domain comprises the amino acid sequence of SEQ ID NO:216.

135. The pharmaceutical formulation or the method of claim 134, wherein the first antibody Fc domain peptide comprises the amino acid sequence of SEQ ID NO:290 and the second antibody Fc domain peptide comprises the amino acid sequence of SEQ ID NO:291.

136. A kit comprising one or more vessels comprising a pharmaceutical formulation, wherein the pharmaceutical formulation comprises:
(a) a heterodimeric Fc-fused protein comprising a first Fc region and a second Fc region of an immunoglobulin Fc (fragment crystallizable) pair and the p40 and p35 subunits of IL-12, wherein the p40 and p35 subunits of IL-12 are linked separately to the first Fc region and the second Fc region, or to the second Fc region and the first Fc region, respectively, wherein the p40 and p35 subunits are each linked to the N-terminus or C-terminus of the Fc regions, and wherein CH3 domains of the first Fc region and the second Fc region each comprise one or more mutations promoting heterodimerization; and
(b) a pharmaceutically acceptable carrier,
and wherein the one or more vessels collectively comprise about 0.1 mg-about 2 mg of heterodimeric Fc-fused protein.

137. The kit of claim 136, wherein the one or more vessels collectively comprise about 0.5 mg to about 2 mg of heterodimeric Fc-fused protein.

138. The kit of claim 137, wherein the one or more vessels collectively comprise about 1 mg of heterodimeric Fc-fused protein.

139. The kit of claim 138, wherein the kit comprises one vessel comprising about 1 mg of heterodimeric Fc-fused protein.

140. The kit of any one of claims 136-139, wherein the pharmaceutical formulation is a lyophilized formulation or a liquid formulation.

141. The kit of claim 140, wherein the pharmaceutical formulation is a liquid formulation supplied in a volume of 1 mL.

142. Use of a heterodimeric Fc-fused protein in the manufacture of a medicament for treating a cancer, wherein the medicament is manufactured in a liquid pharmaceutical formulation comprising about 0.5 g/L to about 1.5 g/L of the heterodimeric Fc-fused protein contained in one or more vessels,
wherein the heterodimeric Fc-fused protein comprises a first Fc region and a second Fc region of an immunoglobulin Fe (fragment crystallizable) pair and the p40 and p35 subunits of IL-12, wherein the p40 and p35 subunits of IL-12 are linked separately to the first Fc region and the second Fc region, or to the second Fc region and the first Fc region, respectively, wherein the p40 and p35 subunits are each linked to the N-terminus or C-terminus of the Fe regions, and wherein CH3 domains of the first Fc region and the second Fc region each comprise one or more mutations promoting heterodimerization.

143. The use of a heterodimeric Fc-fused protein of claim 142, wherein the liquid pharmaceutical formulation comprises about 1.0 g/L of the heterodimeric Fc-fused protein.

144. Use of a heterodimeric Fc-fused protein in the manufacture of a medicament for treating a cancer, wherein the medicament is manufactured in a liquid pharmaceutical formulation comprising about 0.1 mg-about 2 mg of heterodimeric Fc-fused protein contained in one or more vessels,
wherein the heterodimeric Fc-fused protein comprises a first Fc region and a second Fc region of an immunoglobulin Fc (fragment crystallizable) pair and the p40 and p35 subunits of IL-12, wherein the p40 and p35 subunits of IL-12 are linked separately to the first Fc region and the second Fc region, or to the second Fc region and the first Fc region, respectively, wherein the p40 and p35 subunits are each linked to the N-terminus or C-terminus of the Fc regions, and wherein CH3 domains of the first Fc region and the second Fc region each comprise one or more mutations promoting heterodimerization.

145. The use of a heterodimeric Fc-fused protein of claim 144, wherein the liquid pharmaceutical formulation comprises about 1 mg of heterodimeric Fc-fused protein.

146. The use of a heterodimeric Fc-fused protein of any one of claims 142-145, wherein the medicament is contained in one vessel.

147. The use of a heterodimeric Fc-fused protein of any one of claims 142-146, wherein each vessel contains 1 mg of heterodimeric Fc-fused protein.

148. The use of any one of claims 146-147, wherein the medicament is administered to the subject on day 1, every 3 weeks.

149. The use of any one of claims 146-147, wherein the medicament is administered to the subject on day 1, every 4 weeks.

150. The use of any one of claims 146-148, wherein the medicament is administered subcutaneously.

151. The use of any one of claims 146-150, wherein the medicament is administered in a volume of about 0.1 mL to about 1 mL.

152. The use of claim 151, wherein the medicament is administered in a volume of about 1 mL.

153. The use of any one of claims 146-152, wherein the medicament is administered to a maximum of two injection sites.

154. The use of claim 153, wherein a second injection is completed within 10 minutes after a first injection.

155. The use of any one of claims 146-154, wherein the medicament is administered at a dose of about 0.05 mg/kg to about 1.75 mg/kg.

156. The use of claim 155, wherein the medicament is administered at a dose of about 1 mg/kg.

157. The use of any one of claims 146-156, wherein the medicament is diluted prior to administration in a solution of 0.9% saline (sodium chloride for injection) and 0.01% polysorbate 80.

158. A method of manufacturing a heterodimeric Fc-fused protein for the preparation of a pharmaceutical formulation thereof, the method comprising adding acetic acid to a solution comprising the heterodimeric Fc-fused protein obtained from a Chinese Hamster Ovary (CHO) cell culture expressing the heterodimeric Fc-fused protein for 30 minutes to 90 minutes, wherein the acetate adjusts and maintains the pH of the solution at pH 3.55 to 3.75, and
wherein the heterodimeric Fc-fused protein comprises a first Fc region and a second Fc region of an immunoglobulin Fc (fragment crystallizable) pair and the p40 and p35 subunits of IL-12, wherein the p40 and p35 subunits of IL-12 are linked separately to the first Fc region and the second Fc region, or to the second Fc region and the first Fc region, respectively, wherein the p40 and p35 subunits are each linked to the N-terminus or C-terminus of the Fc regions, and wherein CH3 domains of the first Fc region and the second Fc region each comprise one or more mutations promoting heterodimerization.

159. The method of claim 158, wherein the acetic acid is added to the solution comprising the heterodimeric Fc-fused protein for about 60 minutes.

160. The method of claim 158 or 159, wherein the acetic acid adjusts and maintains the pH of the solution to about 3.65.

161. The method of claim 158, wherein the CHO cell culture expressing the heterodimeric Fc-fused protein is maintained in suspension.

162. The method of claim 161, wherein the CHO cell culture expressing the heterodimeric Fc-fused protein is cultured for 7-21 days in a bioreactor.

163. The method of claim 161 or 162, wherein the CHO cell culture expressing the heterodimeric Fc-fused protein is cultured for 14 days in a bioreactor.

164. The method of any one of claims 158-163, wherein the CHO cell culture expressing the heterodimeric Fc-fused protein is harvested by depth filtration to yield a CHO harvest medium.

165. The method of claim 164, wherein the depth filtration is a two-stage single-use depth filtration consisting of DOHC and XOHC filters.

166. The method of claim 164 or 165, wherein the heterodimeric Fc-fused protein is purified from the CHO harvest medium using Protein A capture chromatography, mixed mode chromatography, and cation exchange chromatography to yield the solution comprising the heterodimeric Fc-fused protein.

167. The method of claim 166, wherein Protein A capture chromatography comprises:
equilibrating a Protein A resin with 20 mM Tris, 150 mM NaCl at pH 7.5;
loading CHO harvest medium onto the Protein A resin;
washing the loaded Protein A resin with 20 mM Tris, 150 mM NaCl at pH 7.5;
washing the loaded Protein A resin with 50 mM acetate at pH 5.4; and
eluting the heterodimeric Fc-fused protein from the Protein A resin with 50 mM acetate, 100 mM arginine at pH 3.7 and collecting by 280 nm UV starting at 1.25 AU/cm ascending and ending at 1.25 AU/cm descending.

168. The method of claim 167, wherein the acetic acid is added at a concentration of 0.5M to the solution comprising the heterodimeric Fc-fused protein eluted from the Protein A resin, wherein the acetic acid acidifies the pH of the solution to pH 3.65 for 60 minutes, followed by neutralization of the solution to pH 5.2 by adding 2M Tris.

169. The method of claim 168, wherein following acidification and neutralization of the solution, the solution comprising the heterodimeric Fc-fused protein is passed through a 0.2 μm filter.

170. The method of claim 169, wherein the filtered solution comprising the heterodimeric Fc-fused protein eluted from the Protein A resin is passed through X0SP depth filtration.

171. The method of claim 170, wherein mixed mode chromatography comprises:
equilibrating a mixed mode chromatography column with 50 mM acetate at pH 5.2;
loading the solution passed through X0SP filtration onto the mixed mode chromatography column;
washing the loaded mixed mode chromatography column with 50 mM acetate at pH 5.2; and
eluting the heterodimeric Fc-fused protein from the mixed mode chromatography column with 50 mM Acetate, 250 mM NaCl at pH 5.2 and collecting by 280 nm UV starting at 0.625 AU/cm ascending and ending at 1.50 AU/cm descending.

172. The method of claim 171, wherein the solution comprising the heterodimeric Fc-fused protein eluted from the mixed mode chromatography column is passed through a 0.2 μm filter.

173. The method of claim 172, wherein cation exchange chromatography comprises:
equilibrating a cation exchange chromatography resin with 50 mM Tris at pH 7.4;
loading the filtered solution eluted from the mixed mode chromatography column onto the cation exchange chromatography resin;
washing the loaded cation exchange chromatography resin with 50 mM Tris at pH 7.4; and
eluting the heterodimeric Fc-fused protein from the cationic exchange chromatography resin with a gradient of 50 mM Tris at pH 7.4 and 50 mM Tris, 0.5 M NaCl at pH 7.4, and collecting by 280 nm UV starting at 2.5 AU/cm ascending and ending at 4.5 AU/cm descending.

174. The method of claim 173, wherein the solution comprising the heterodimeric Fc-fused protein eluted from the cation exchange chromatography resin is passed through a 0.2 μm filter.

175. The method of claim 174, wherein the filtered solution comprising the heterodimeric Fc-fused protein eluted from the cation exchange chromatography resin is nanofiltrated through a prefilter, a 20 nm nominal filter, and a 0.2 μm membrane.

176. The method of claim 175, wherein the nanofiltrated solution comprising the heterodimeric Fc-fused protein is ultrafiltrated and diafiltrated, wherein ultrafilitration and diafiltration comprises:
equilibrating an ultrafiltration system with 50 mM Tris, 265 mM NaCl at pH 7.4;
concentrating the nanofiltrated solution comprising the heterodimeric Fc-fused protein to a concentration of about 5.0 g/L;
exchanging the buffer using 7 diavolumes of 20 mM citrate at pH 6.5;
concentration the diafiltrated solution comprising the heterodimeric Fc-fused protein to a concentration of about 11.0 g/L;
diluting the concentration solution comprising the heterodimeric Fc-fused protein to a concentration of about 5 g/L to about 10 g/L with 20 mM citrate at pH 6.5; and
adding 20 mM citrate, 18% (w/v) sucrose, 3% (w/v) mannitol, 0.03% (w/v) polysorbate-80 at pH 6.5 to achieve a final concentration of the ultrafitration/diafiltration retentate solution comprising the heterodimeric Fc-fused protein of 20 mM citrate, 6% (w/v) sucrose, 1% (w/v) mannitol, 0.01% (w/v) polysorbate-80.

177. The method of claim 176, wherein the ultrafiltrated/diafiltrated solution comprising the heterodimeric Fc-fused protein is passed through a 0.2 μm membrane to yield a bulk drug substance.

178. The method of claim 177, wherein the bulk drug substance is diluted to an 80% drug product solution in a 0.2 μm filtered buffer comprising 20 mM citrate, 6% (w/v) sucrose, 1% (w/v) mannitol, and 0.01% (w/v) polysorbate-80 at pH 6.5.

179. The method of claim 177 or 178, wherein the bulk drug substance or 80% drug product is diluted to a concentration for administration of 1 mg/mL of the heterodimeric Fc-fused protein in a 0.2 μm filtered buffer comprising 20 mM citrate, 6% (w/v) sucrose, 1% (w/v) mannitol, and 0.01% (w/v) polysorbate-80 at pH 6.5.

180. A method of treating cancer in a subject who has received treatment with a checkpoint inhibitor antibody for at least 6 weeks, the method comprising administering a pharmaceutical formulation comprising a heterodimeric Fc-fused protein and a pharmaceutically acceptable carrier to the subject, wherein the heterodimeric Fc-fused protein comprises a first Fc region and a second Fc region of an immunoglobulin Fc (fragment crystallizable) pair and the p40 and p35 subunits of IL-12, wherein the p40 and p35 subunits of IL-12 are linked separately to the first Fc region and the second Fc region, or to the second Fc region and the first Fc region, respectively, wherein the p40 and p35 subunits are each linked to the N-terminus or C-terminus of the Fc regions, and wherein CH3 domains of the first Fc region and the second Fc region each comprise one or more mutations promoting heterodimerization.

181. The method of claim 180, wherein the checkpoint inhibitor antibody is an anti-programmed cell death protein 1 (PD-1) antibody.

182. The method of claim 180 or 181, wherein the cancer is melanoma.

183. The method of claim 182, wherein the melanoma is unresectable or metastatic.

184. The method of claim 182 or 183, wherein the subject is confirmed to have progressive disease at least 4 weeks after the initial diagnosis of progressive disease while receiving the anti-PD-1 antibody.

185. The method of any one of claims 182-184, wherein the subject is confirmed to have progressive disease at least 4 weeks after the initial diagnosis of progressive disease while receiving the anti-PD-1 antibody.

186. The method of any one of claims 184 or 185, wherein progressive disease is confirmed by radiological or clinical observation.

187. A method of treating cancer in a subject who has received treatment with a checkpoint inhibitor antibody or an anti-vascular endothelial growth factor therapy as a monotherapy, or in combination, the method comprising administering a pharmaceutical formulation comprising a heterodimeric Fc-fused protein and a pharmaceutically acceptable carrier to the subject, wherein the heterodimeric Fc-fused protein comprises a first Fc region and a second Fc region of an immunoglobulin Fc (fragment crystallizable) pair and the p40 and p35 subunits of IL-12, wherein the p40 and p35 subunits of IL-12 are linked separately to the first Fc region and the second Fc region, or to the second Fc region and the first Fc region, respectively, wherein the p40 and p35 subunits are each linked to the N-terminus or C-terminus of the Fc regions, and wherein CH3 domains of the first Fc region and the second Fc region each comprise one or more mutations promoting heterodimerization.

188. The method of claim 187, wherein the checkpoint inhibitor antibody is an anti-PD-1 antibody or an anti-PD-L1 antibody.

189. The method of claim 187 or 188, wherein the cancer is advanced renal cell carcinoma (RCC).

190. The method of claim 189, wherein the RCC is unresectable or metastatic.

191. The method of claim 189 or 190, wherein the RCC has a clear cell component.

192. The method of any one of claims 189-191, wherein the subject received no more than 3 previous lines of therapy.

193. The method of any one of claims 189-192, wherein the subject has not received treatment with a checkpoint inhibitor.

194. The method of claim 193, wherein the checkpoint inhibitor comprises an anti-PD-1 antibody or anti-PD-L1 antibody as a monotherapy or in combination with a platinum based chemotherapy.

195. A method of treating cancer in a subject who has received treatment with only one platinum-containing regimen, the method comprising administering a pharmaceutical formulation comprising a heterodimeric Fc-fused protein and a pharmaceutically acceptable carrier to the subject, wherein the heterodimeric Fc-fused protein comprises a first Fc region and a second Fc region of an immunoglobulin Fc (fragment crystallizable) pair and the p40 and p35 subunits of IL-12, wherein the p40 and p35 subunits of IL-12 are linked separately to the first Fc region and the second Fc region, or to the second Fc region and the first Fc region, respectively, wherein the p40 and p35 subunits are each linked to the N-terminus or C-terminus of the Fc regions, and wherein CH3 domains of the first Fc region and the second Fc region each comprise one or more mutations promoting heterodimerization.

196. The method of claim 195, wherein the platinum containing regimen is platinum in combination with an agent selected from gemcitabine, methotrexate, vinblastine, and doxorubicin.

197. The method of claim 195 or 196, wherein the cancer is locally advanced or metastatic transitional cell urothelial carcinoma.

198. The method of claim 197, wherein the urothelial carcinoma includes one or more of the group consisting of the renal pelvis, ureters, urinary urothelium, and urethra.

199. The method of claim 197 or 198, wherein the urothelial carcinoma is inoperable.

200. The method of any one of claims 197-199, wherein the urothelial carcinoma is characterized with radiographic progression or with recurrence within 6 months after the last administration of a platinum-containing regimen as an adjuvant.

201. The method of any one of claims 197-200, wherein the urothelial carcinoma is considered failure of a first-line, platinum-containing regimen.

202. The method of any one of claims 197-201, wherein the subject has received no more than 2 lines of therapy (including the platinum-containing regimen) for the treatment of the urothelial carcinoma prior to administration of the pharmaceutical formulation.

203. The method of any one of claims 197-202, wherein the subject has not received treatment with a checkpoint inhibitor (CPI) as a first-line therapy.

204. The method of claim 203, wherein the checkpoint inhibitor is an anti-PD-1 antibody or anti-PD-L1 antibody.

205. The method of claim 203 or 204, wherein the checkpoint inhibitor is a monotherapy or in combination with a platinum based chemotherapy.

206. The method of any one of claims 195-205, wherein the pharmaceutical formulation is administered in combination with pembrolizumab.

207. The method of claim 206, wherein pembrolizumab is administered once every 3 weeks.

208. The method of claim 206 or 207, wherein pembrolizumab is administered before administration of the pharmaceutical formulation.

209. The method of claim 208, wherein the pharmaceutical formulation is administered within one hour after the completion of administration of pembrolizumab.

210. The method of any one of claims 206-209, wherein pembrolizumab is administered at a dose of 200 mg.

211. The method of any one of claims 206-210, wherein pembrolizumab is administered intravenously.

212. The method of any one of claims 206-211, wherein the cancer is selected from the group consisting of: melanoma, non-small cell lung cancer (NSCLC), small cell lung cancer (SCLC), head and neck squamous cell carcinoma (HNSCC), classical Hodgkin lymphoma, primary mediastinal large B-cell lymphoma, urothelial carcinoma, microsatellite instability-high cancer, gastric cancer, oesophageal cancer, cervical cancer, hepatocellular carcinoma, Merkel cell carcinoma, renal cell carcinoma, and endometrial carcinoma.

213. The method of any one of claims 195-205, wherein the pharmaceutical formulation is administered in combination with nivolumab.

214. The method of claim 213, wherein nivolumab is administered before administration of the pharmaceutical formulation.

215. The method of claim 214, wherein the pharmaceutical formulation is administered within one hour after the completion of administration of nivolumab.

216. The method of any one of claims 213-215, wherein nivolumab is administered at a dose of about 480 mg.

217. The method of any one of claims 213-216, wherein nivolumab is administered intravenously.

218. The method of any one of claims 213-217, wherein the cancer is selected from the group consisting of: melanoma, non-small cell lung cancer (NSCLC), small cell lung cancer (SCLC), renal cell carcinoma, classical Hodgkin lymphoma, head and neck squamous cell carcinoma (HNSCC), colorectal cancer, hepatocellular carcinoma, bladder cancer, and oesophageal cancer.

219. The method of claim 218, wherein the cancer is melanoma.

220. The method of claim 219, wherein the melanoma is unresectable or metastatic.

221. The method of claim 218, wherein the cancer is colorectal cancer.

222. The method of claim 221, wherein the colorectal cancer is microsatellite instability-high (MSI-H) or mismatch repair deficient (dMMR) metastatic colorectal cancer.

223. The method of any one of claims 180-211, wherein the pharmaceutical formulation is administered to the subject on day 1, every 3 weeks.

224. The method of any one of claims 180-222, wherein the pharmaceutical formulation is administered to the subject on day 1, every 4 weeks.

225. The method of any one of claims 180-223, wherein the pharmaceutical formulation is administered subcutaneously.

226. The method of any one of claims 180-225, wherein the pharmaceutical formulation is administered in a volume of about 0.1 mL to about 1 mL.

227. The method of claim 226, wherein the pharmaceutical formulation is administered in a volume of about 1 mL.

228. The method of any one of claims 180-227, wherein the pharmaceutical formulation is administered to a maximum of two injection sites.

229. The method of claim 228, wherein a second injection is completed within 10 minutes after a first injection.

230. The method of any one of claims 180-229, wherein the pharmaceutical formulation is administered at a dose of about 0.05 mg/kg to about 1.75 mg/kg.

231. The method of claim 230, wherein the pharmaceutical formulation is administered at a dose of about 1 mg/kg.

232. The method of any one of claims 180-231, wherein the pharmaceutical formulation is diluted prior to administration in a solution of 0.9% saline (sodium chloride for injection) and 0.01% polysorbate 80.

233. The method of any one of claims 180-232, wherein the presence of the cancer is determined using the Response Evaluation Criteria for Solid Tumors (RECIST), version 1.1.

234. The method of any one of claims 180-233, wherein a subject who has a confirmed complete response is treated with the pharmaceutical formulation for at least 12 months after confirmation unless a criterion for discontinuation is met.

235. A method of treating a subject whose blood concentration of C-reactive protein (CRP) is monitored, the method comprising administering to the subject a pharmaceutical formulation comprising a heterodimeric Fc-fused protein and a pharmaceutically acceptable carrier, wherein the heterodimeric Fc-fused protein comprises a first Fc region and a second Fc region of an immunoglobulin Fc (fragment crystallizable) pair and the p40 and p35 subunits of IL-12, wherein the p40 and p35 subunits of IL-12 are linked separately to the first Fc region and the second Fc region, or to the second Fc region and the first Fc region, respectively, wherein the p40 and p35 subunits are each linked to the N-terminus or C-terminus of the Fc regions, and wherein CH3 domains of the first Fc region and the second Fc region each comprise one or more mutations promoting heterodimerization.

236. The method of claim 235, wherein
(1) if the CRP concentration in the subject's blood is higher than a threshold CRP concentration, then the subject is identified as being at risk for developing an adverse drug reaction; and
(2) if the CRP concentration in the subject's blood is about the same or lower than the threshold C-reactive protein concentration, the subject is not identified as being at risk for developing an adverse drug reaction.

237. The method of claim 235, wherein if the CRP concentration in the subject's blood is higher than the threshold CRP concentration, then (1) the administration of the pharmaceutical formulation is paused; (2) the heterodimeric Fc-fused protein is administered at a lower dose; or (3) a remedial action is taken to reduce or alleviate the formulation's toxicity effects in the subject.

238. A method of treating cancer in a subject in need thereof, the method comprising subcutaneous administration of a pharmaceutical formulation comprising a heterodimeric Fc-fused protein and pharmaceutically acceptable carrier to the subject,
wherein the heterodimeric Fc-fused protein comprises a first Fc region and a second Fc region of an immunoglobulin Fc (fragment crystallizable) pair and the p40 and p35 subunits of IL-12, wherein the p40 and p35 subunits of IL-12 are linked separately to the first Fc region and the second Fc region, or to the second Fc region and the first Fc region, respectively, wherein the p40 and p35 subunits are each linked to the N-terminus or C-terminus of the Fc regions, and wherein CH3 domains of the first Fc region and the second Fc region each comprise one or more mutations promoting heterodimerization; and the pharmaceutical formulation comprises citrate; a sugar; a sugar alcohol; and a non-ionic surfactant, and the pH of the formulation is between 5.5 and 7.0.

239. The kit of any one of claims 136-141, the use of any one of claims 142-157, or the method of any one of claims 158-238, wherein the first Fc region and second Fc region are human IgG1 Fc regions.

240. The kit, the use, or the method of claim 239, wherein human IgG1 Fc regions comprise one or more mutation(s) that reduce(s) an effector function of an Fc.

241. The kit, the use, or the method of claim 240, wherein the first Fc region and second Fc region comprise one or more mutation(s) selected from L234A, L235A or L235E, G237A, P329A, A330S, and P331S, numbered according to the EU numbering system.

242. The kit, the use, or the method of claim 241, wherein the first Fc region and second Fc region each comprise mutations L234A, L235A, and P329A.

243. The kit, the use, or the method of claim 242, wherein the p40 subunit of IL12 comprises the amino acid sequence of SEQ ID NO: 127 and the p35 subunit of IL-12 comprises the amino acid sequence of SEQ ID NO: 128.

244. The kit, the use, or the method of claim 243, wherein the p35 subunit of IL-12 is fused to the second Fc region by a linker comprising the amino acid sequence of SEQ ID NO: 108.

245. The kit, the use, or the method of claim 244, wherein
(a) the first Fc region comprises mutations L234A, L235A, P329A, Y349C, K360E, and K409W, and
(b) the second Fc region comprises mutations L234A, L235A, P329A, Q347R, S354C, D399V, and F405T.

246. The kit, the use, or the method of claim 245, wherein
(a) the first Fc region comprises the amino acid sequence of SEQ ID NO:215, and
(b) the second Fc region comprises the amino acid sequence of SEQ ID NO:216.

247. The kit, the use, or the method of claim 246, wherein the first Fc region linked to the p40 subunit of IL12 comprises the amino acid sequence of SEQ ID NO:290 and the second Fc region linked to the p35 subunit of IL-12 comprises the amino acid sequence of SEQ ID NO:291.

248. The kit, the use, or the method of any one of claims 239-247, wherein the pharmaceutical formulation comprises: (a) citrate; (b) a sugar; (c) a sugar alcohol; and (d) a non-ionic surfactant, further wherein the pH of the formulation is between about 6.0 and about 7.0.

249. The kit, the use, or the method of claim 248, wherein the concentration of citrate in the pharmaceutical formulation is about 10 mM to about 30 mM.

250. The kit, the use, or the method of claim 249, wherein the concentration of citrate in the pharmaceutical formulation is about 20 mM.

251. The kit, the use, or the method of any one of claims 248-250, wherein the concentration of the sugar in the pharmaceutical formulation is about 3% to about 12% (w/v).

252. The kit, the use, or the method of claim 251, wherein the concentration of the sugar in the pharmaceutical formulation is about 6% (w/v).

253. The kit, the use, or the method of claim 251 or 252, wherein the sugar is a disaccharide.

254. The kit, the use, or the method of claim 253, wherein the disaccharide is sucrose.

255. The kit, the use, or the method of any one of claims 248-254, wherein the concentration of the sugar alcohol in the pharmaceutical formulation is between about 0.5% to about 6% (w/v).

256. The kit, the use, or the method of claim 255, wherein the concentration of the sugar alcohol in the pharmaceutical formulation is about 1% (w/v).

257. The kit, the use, or the method of any one of claims 248-256, wherein the sugar alcohol is derived from a monosaccharide.

258. The kit, the use, or the method of claim 257, wherein the sugar alcohol is mannitol.

259. The kit, the use, or the method of any one of claims 248-258, wherein the concentration of the non-ionic surfactant in the pharmaceutical formulation is between about 0.005% to about 0.02% (w/v).

260. The kit, the use, or the method of claim 259, wherein the concentration of polysorbate 80 in the pharmaceutical formulation is about 0.01% (w/v).

261. The kit, the use, or the method of claim 259 or 260, wherein the non-ionic surfactant is a polysorbate.

262. The kit, the use, or the method of claim 261, wherein the polysorbate is polysorbate 80.

263. The kit, the use, or the method of any one of claims 248-262, wherein the pH is between about 6.1 and about 6.9.

264. The kit, the use, or the method of claim 263, wherein the pH is between about 6.2 and about 6.8.

265. The kit, the use, or the method of claim 264, wherein the pH is between about 6.3 and about 6.7.

266. The kit, the use, or the method of claim 265, wherein the pH is between about 6.4 and about 6.6.

267. The kit, the use, or the method of claim 266, wherein the pH is about 6.5.

268. The kit, the use, or the method of any one of claims 248-267, wherein the pharmaceutical formulation further comprising water.

269. The kit, the use, or the method of claim 268, wherein the water is Water for Injection, USP.

270. The kit, the use, or the method of any one of claims 248-269, wherein the pharmaceutical formulation comprises a bulk concentration of heterodimeric Fc-fused protein of about 1 g/L to about 10 g/L.

271. The kit, the use, or the method of claim 270, wherein the pharmaceutical formulation comprises a bulk concentration of heterodimeric Fc-fused protein of about 2 g/L to about 8 g/L.

272. The kit, the use, or the method of claim 271, wherein the pharmaceutical formulation comprises a bulk concentration of heterodimeric Fc-fused protein of about 4 g/L to about 6 g/L.

273. The kit, the use, or the method of claim 272, wherein the pharmaceutical formulation comprises a bulk concentration of heterodimeric Fc-fused protein of about 5 g/L.

274. The kit, the use, or the method of any one of claims 248-273, wherein the pharmaceutical formulation comprises a concentration of the protein for administration of about 0.5 g/L to about 1.5 g/L.

275. The kit, the use, or the method of claim 274, wherein the pharmaceutical formulation comprises a concentration of the protein for administration of about 0.75 g/L to about 1.25 g/L.

276. The kit, the use, or the method of claim 275, wherein the pharmaceutical formulation comprises a concentration of the protein for administration of about 1 g/L.

277. The kit, the use, or the method of any one of 248-276, wherein the formulation is designed to be stored at a temperature between 2° C. and 8° C.

278. The kit, the use, or the method of any one of claims 248-277, wherein the pharmaceutical formulation is a clear, colorless solution and free of visible particulates.

279. The kit, the use, or the method of any one of claims 248-278, wherein the pharmaceutical formulation has a thermal stability profile as defined by:
(a) a Tₘ₁ of greater than about 60° C., greater than about 61° C., greater than about 62° C., greater than about 63° C., greater than about 64° C., greater than about 65° C., or greater than about 66° C.; and/or
(b) a Tₘ₂ of greater than about 70° C., greater than about 71° C., greater than about 72° C., greater than about 73° C., greater than about 74° C., greater than about 75° C., greater than about 76° C., or greater than about 77° C.,
as measured by differential scanning fluorimetry.

280. The kit, the use, or the method of claim 279, wherein the formulation has a thermal stability profile as defined by a Tₘ₁ of about 67.0° C. and a Tₘ₂ of about 77.3° C.

281. The kit, the use, or the method of claim 280, wherein the thermal stability profile of the pharmaceutical formulation, as defined by Tₘ₁ and/or Tₘ₂ is changed by less than about 2° C. or less than about 1° C. when the pharmaceutical formulation is incubated for 1 week at 50° C., as compared to the same pharmaceutical formulation that is incubated for 1 week at 5° C., as measured by differential scanning fluorimetry.

282. The kit, the use, or the method of any one of 248-281, wherein the formulation has a thermal stability profile as defined by a T_{agg} of greater than 60° C., greater than about 61° C., greater than about 62° C., greater than about 63° C., greater than about 64° C., greater than about 65° C., greater than about 66° C., or greater than about 67° C., as measured by differential scanning fluorimetry.

283. The kit, the use, or the method of claim 282, wherein the thermal stability profile of the pharmaceutical formulation, as defined by T_{agg} is changed by less than about 2° C. or less than about 1° C. when the pharmaceutical formulation is incubated for 1 week at 50° C., as compared to the same pharmaceutical formulation that is incubated for 1 week at 5° C., as measured by differential scanning fluorimetry.

284. The kit, the use, or the method of any one of claims 248-283, wherein the pH of the pharmaceutical formulation does not change by more than about 0.2 or about 0.1 in pH value after the pharmaceutical formulation is incubated for 1 week at 5° C.

285. The kit, the use, or the method of any one of claims 248-284, wherein the pH of the pharmaceutical formulation does not change by more than about 0.2 or about 0.1 in pH value after the pharmaceutical formulation is incubated for 1 week at 50° C.

286. The kit, the use, or the method of any one of claims 248-285, wherein the heterodimeric Fc-fused protein in the pharmaceutical formulation has a Z-average hydrodynamic diameter of less than about 15 nm, less than about 14 nm, less than about 13 nm, or less than about 12 nm, as measured by dynamic light scattering at 25° C.

287. The kit, the use, or the method of claim 286, wherein the heterodimeric Fc-fused protein in the pharmaceutical formulation has a Z-average hydrodynamic diameter of about 11.6 nm.

288. The kit, the use, or the method of any one of claims 248-287, wherein the heterodimeric Fc-fused protein in the pharmaceutical formulation has a Z-average hydrodynamic diameter of less than about 20 nm, less than about 19 nm, less than about 18 nm, less than about 17 nm, less than about 16 nm, or less than about 15 nm, as measured by dynamic light scattering at 25° C., after the pharmaceutical formulation is incubated for 2 weeks at 50° C.

289. The kit, the use, or the method of claim 288, wherein the heterodimeric Fc-fused protein in the pharmaceutical formulation has a Z-average hydrodynamic diameter of about 14.4 nm.

290. The kit, the use, or the method of any one of claims 248-289, wherein the heterodimeric Fc-fused protein in the pharmaceutical formulation has a Z-average hydrodynamic diameter of less than about 20 nm, less than about 19 nm, less than about 18 nm, less than about 17 nm, or less than about 16 nm, as measured by dynamic light scattering at 25° C., after the pharmaceutical formulation is subjected to five freeze thaw cycles.

291. The kit, the use, or the method of claim 290, wherein the heterodimeric Fc-fused protein in the pharmaceutical formulation has a Z-average hydrodynamic diameter of about 15.3 nm.

292. The kit, the use, or the method of any one of claims 248-291, wherein the polydispersity index of the heterodimeric Fc-fused protein in the pharmaceutical formulation is less than about 0.30, less than about 0.29, less than about 0.28, or less than about 0.27, as measured by dynamic light scattering at 25° C.

293. The kit, the use, or the method of any one of claims 248-292, wherein the polydispersity index of the heterodimeric Fc-fused protein in the pharmaceutical formulation is about 0.26.

294. The kit, the use, or the method of any one of claims 248-293, wherein the polydispersity index of the heterodimeric Fc-fused protein in the pharmaceutical formulation is less than about 0.30, less than about 0.29, less than about 0.28, less than about 0.27, or less than about 0.26, as measured by dynamic light scattering at 25° C., after the pharmaceutical formulation is incubated for 2 weeks at 50° C.

295. The kit, the use, or the method of any one of claims 248-294, wherein the polydispersity index of the heterodimeric Fc-fused protein in the pharmaceutical formulation is about 0.25.

296. The kit, the use, or the method of any one of claims 248-295, wherein the polydispersity index of the heterodimeric Fc-fused protein in the pharmaceutical formulation is less than about 0.40, less than about 0.35, or less than about 0.34, as measured by dynamic light scattering at 25° C., after the pharmaceutical formulation is subjected to five freeze thaw cycles.

297. The kit, the use, or the method of any one of claims 248-296, wherein the polydispersity index of the heterodimeric Fc-fused protein in the pharmaceutical formulation is about 0.33.

298. The kit, the use, or the method of any one of claims 248-297, wherein the purity profile of the pharmaceutical formulation, as measured by the area of the main peak as a percentage of total detected area in a SEC-HPLC analysis, is greater than about 90%, greater than about 91%, greater than about 92%, greater than about 93%, greater than about 94%, greater than about 95%, greater than about 96%, greater than about 97%, greater than about 98%, or greater than about 99%.

299. The kit, the use, or the method of claim 298, wherein the purity profile of the pharmaceutical formulation, as measured by the area of the main peak as a percentage of total detected area in a SEC-HPLC analysis, is about 99.0%.

300. The kit, the use, or the method of any one of claims 248-299, wherein the purity profile of the pharmaceutical formulation, as measured by the area of the main peak as a percentage of total detected area in a SEC-HPLC analysis, is greater than about 75%, greater than about 80%, greater than about 81%, greater than about 82%, greater than about 83%, greater than about 84%, or greater than about 85%, after the pharmaceutical formulation is incubated for 2 weeks at 50° C.

301. The kit, the use, or the method of claim 300, wherein the purity profile of the pharmaceutical formulation, as measured by the area of the main peak as a percentage of total detected area in a SEC-HPLC analysis, is about 85.2%.

302. The kit, the use, or the method of any one of claims 248-301, wherein the purity profile of the pharmaceutical formulation, as measured by the area of the main peak as a percentage of total detected area in a SEC-HPLC analysis, is greater than about 90%, greater than about 91%, greater than about 92%, greater than about 93%, greater than about 94%, greater than about 95%, greater than about 96%, greater than about 97%, or greater than about 98%, after the pharmaceutical formulation is subjected to five freeze thaw cycles.

303. The kit, the use, or the method of claim 302, wherein the purity profile of the pharmaceutical formulation, as measured by the area of the main peak as a percentage of total detected area in a SEC-HPLC analysis, is about 98.9%.

The application's sequence listing, which the Patent Office published only in electronic form, follows.

SEQUENCE LISTING (299 sequences)

SEQ ID NO: 1 - protein, 21 aa, Artificial Sequence
  Description of Artificial Sequence: Synthetic peptide
  MOD_RES (19)..(19): Leu or Glu
RVESKYGPPCPPCPAPEFXGG

SEQ ID NO: 2 - protein, 21 aa, Artificial Sequence
  Description of Artificial Sequence: Synthetic peptide
RVESKYGPPCPPCPAPEFLGG

SEQ ID NO: 3 - protein, 36 aa, Artificial Sequence
  Description of Artificial Sequence: Synthetic polypeptide
GGGGSGGGGSGGGGSRVESKYGPPCPPCPAPEFLGG

SEQ ID NO: 4 - protein, 21 aa, Artificial Sequence
  Description of Artificial Sequence: Synthetic peptide
RVESKYGPPCPPCPAPEFEGG

SEQ ID NO: 5 - protein, 36 aa, Artificial Sequence
  Description of Artificial Sequence: Synthetic polypeptide
GGGGSGGGGSGGGGSRVESKYGPPCPPCPAPEFEGG

SEQ ID NO: 6 - protein, 22 aa, Artificial Sequence
  Description of Artificial Sequence: Synthetic peptide
  MOD_RES (19)..(19): Leu or Ala
  MOD_RES (20)..(20): Leu, Glu or Ala
  MOD_RES (22)..(22): Ala or Gly
EPKSSDKTHTCPPCPAPEXXGX

SEQ ID NO: 7 - protein, 22 aa, Artificial Sequence
  Description of Artificial Sequence: Synthetic peptide
EPKSSDKTHTCPPCPAPELLGG

SEQ ID NO: 8 - protein, 37 aa, Artificial Sequence
  Description of Artificial Sequence: Synthetic polypeptide
GGGGSGGGGSGGGGSEPKSSDKTHTCPPCPAPELLGG

SEQ ID NO: 9 - protein, 22 aa, Artificial Sequence
  Description of Artificial Sequence: Synthetic peptide
EPKSSDKTHTCPPCPAPEAAGG

SEQ ID NO: 10 - protein, 37 aa, Artificial Sequence
  Description of Artificial Sequence: Synthetic polypeptide
GGGGSGGGGSGGGGSEPKSSDKTHTCPPCPAPEAAGG

SEQ ID NO: 11 - protein, 22 aa, Artificial Sequence
  Description of Artificial Sequence: Synthetic peptide
EPKSSDKTHTCPPCPAPEAEGA

SEQ ID NO: 12 - protein, 37 aa, Artificial Sequence
  Description of Artificial Sequence: Synthetic polypeptide
GGGGSGGGGSGGGGSEPKSSDKTHTCPPCPAPEAEGA

SEQ ID NO: 13 - protein, 26 aa, Artificial Sequence
  Description of Artificial Sequence: Synthetic peptide
GGGGSRVESKYGPPCPPCPAPEFLGG

SEQ ID NO: 14 - protein, 31 aa, Artificial Sequence
  Description of Artificial Sequence: Synthetic polypeptide
GGGGSGGGGSRVESKYGPPCPPCPAPEFLGG

SEQ ID NO: 15 - protein, 27 aa, Artificial Sequence
  Description of Artificial Sequence: Synthetic peptide
GGGGSEPKSSDKTHTCPPCPAPELLGG

SEQ ID NO: 16 - protein, 32 aa, Artificial Sequence
  Description of Artificial Sequence: Synthetic polypeptide
GGGGSGGGGSEPKSSDKTHTCPPCPAPELLGG

SEQ ID NO: 17 - protein, 536 aa, Artificial Sequence
  Description of Artificial Sequence: Synthetic polypeptide
IWELKKDVYVVELDWYPDAPGEMVVLTCDTPEEDGITWTLDQSSEVLGSGKTLTIRVKEFGDAGQYTCHKGGEVLSHSLLLLHKKEDGIWSTDILKDQKEPKNKTFLRCEAKNYSGRFTCWWLTTISTDLTFSVKSSRGSSDPQGVTCGAATLSAERVRGDNKEYEYSVECQEDSACPAAEESLPIEVMVDAVHKLKYENYTSSFFIRDIIKPDPPKNLQLKPLKNSRQVEVSWEYPDTWSTPHSYFSLTFCVQVQGKSKREKKDRVFTDKTSATVICRKNASISVRAQDRYYSSSWSEWASVPCSRVESKYGPPCPPCPAPEFLGGPSVFLFPPKPKDTLMISRTPEVTCVVVDVSQEDPEVQFNWYVDGVEVHNAKTKPREEQFNSTYRVVSVLTVLHQDWLNGKEYKCKVSNKGLPSSIEKTISKAKGQPREPQVCTLPPSQEEMTKNQVSLTCLVEGFYPSDIAVEWESNGQPENNYKTTPPVLDSDGSFFLYSWLTVDKSRWQEGNVFSCSVMHEALHNHYTQKSLSLSLG

SEQ ID NO: 18 - protein, 442 aa, Artificial Sequence
  Description of Artificial Sequence: Synthetic polypeptide
RNLPVATPDPGMFPCLHHSQNLLRAVSNMLQKARQTLEFYPCTSEEIDHVDITKDKTSTVEACLPLELTKNESCLNSRETSFITNGSCLASRKTSFMMALCLSSIYEDLKMYQVEFKTMNAKLLMDPKRQIFLDQNMLAVIDELMQALNFNSETVPQKSSLEEPDFYKTKIKLCILLHAFRIRAVTIDRVMSYLNASGGGGSGGGGSGGGGSRVESKYGPPCPPCPAPEFLGGPSVFLFPPKPKDTLMISRTPEVTCVVVDVSQEDPEVQFNWYVDGVEVHNAKTKPREEQFNSTYRVVSVLTVLHQDWLNGKEYKCKVSNKGLPSSIEKTISKAKGQPREPQVYTLPPCQENMTKNQVSLTCLVKGFYPSDIAVEWESNGQPENNYKTTPPVLVSDGSFTLYSRLTVDKSRWQEGNVFSCSVMHEALHNHYTQKSLSLSLG

SEQ ID NO: 19 - protein, 536 aa, Artificial Sequence
  Description of Artificial Sequence: Synthetic polypeptide
IWELKKDVYVVELDWYPDAPGEMVVLTCDTPEEDGITWTLDQSSEVLGSGKTLTIRVKEFGDAGQYTCHKGGEVLSHSLLLLHKKEDGIWSTDILKDQKEPKNKTFLRCEAKNYSGRFTCWWLTTISTDLTFSVKSSRGSSDPQGVTCGAATLSAERVRGDNKEYEYSVECQEDSACPAAEESLPIEVMVDAVHKLKYENYTSSFFIRDIIKPDPPKNLQLKPLKNSRQVEVSWEYPDTWSTPHSYFSLTFCVQVQGKSKREKKDRVFTDKTSATVICRKNASISVRAQDRYYSSSWSEWASVPCSRVESKYGPPCPPCPAPEFLGGPSVFLFPPKPKDTLMISRTPEVTCVVVDVSQEDPEVQFNWYVDGVEVHNAKTKPREEQFNSTYRVVSVLTVLHQDWLNGKEYKCKVSNKGLPSSIEKTISKAKGQPREPQVCTLPPSQEEMTENQVSLTCLVKGFYPSDIAVEWESNGQPENNYKTTPPVLDSDGSFFLYSWLTVDKSRWQEGNVFSCSVMHEALHNHYTQKSLSLSLG

SEQ ID NO: 20 - protein, 442 aa, Artificial Sequence
  Description of Artificial Sequence: Synthetic polypeptide
RNLPVATPDPGMFPCLHHSQNLLRAVSNMLQKARQTLEFYPCTSEEIDHVDITKDKTSTVEACLPLELTKNESCLNSRETSFITNGSCLASRKTSFMMALCLSSIYEDLKMYQVEFKTMNAKLLMDPKRQIFLDQNMLAVIDELMQALNFNSETVPQKSSLEEPDFYKTKIKLCILLHAFRIRAVTIDRVMSYLNASGGGGSGGGGSGGGGSRVESKYGPPCPPCPAPEFLGGPSVFLFPPKPKDTLMISRTPEVTCVVVDVSQEDPEVQFNWYVDGVEVHNAKTKPREEQFNSTYRVVSVLTVLHQDWLNGKEYKCKVSNKGLPSSIEKTISKAKGQPREPRVYTLPPCQEEMTKNQVSLTCLVKGFYPSDIAVEWESNGQPENNYKTTPPVLVSDGSFTLYSRLTVDKSRWQEGNVFSCSVMHEALHNHYTQKSLSLSLG

SEQ ID NO: 21 - protein, 536 aa, Artificial Sequence
  Description of Artificial Sequence: Synthetic polypeptide
IWELKKDVYVVELDWYPDAPGEMVVLTCDTPEEDGITWTLDQSSEVLGSGKTLTIRVKEFGDAGQYTCHKGGEVLSHSLLLLHKKEDGIWSTDILKDQKEPKNKTFLRCEAKNYSGRFTCWWLTTISTDLTFSVKSSRGSSDPQGVTCGAATLSAERVRGDNKEYEYSVECQEDSACPAAEESLPIEVMVDAVHKLKYENYTSSFFIRDIIKPDPPKNLQLKPLKNSRQVEVSWEYPDTWSTPHSYFSLTFCVQVQGKSKREKKDRVFTDKTSATVICRKNASISVRAQDRYYSSSWSEWASVPCSRVESKYGPPCPPCPAPEFEGGPSVFLFPPKPKDTLMISRTPEVTCVVVDVSQEDPEVQFNWYVDGVEVHNAKTKPREEQFNSTYRVVSVLTVLHQDWLNGKEYKCKVSNKGLPSSIEKTISKAKGQPREPQVCTLPPSQEEMTENQVSLTCLVKGFYPSDIAVEWESNGQPENNYKTTPPVLDSDGSFFLYSWLTVDKSRWQEGNVFSCSVMHEALHNHYTQKSLSLSLG

SEQ ID NO: 22 - protein, 442 aa, Artificial Sequence
  Description of Artificial Sequence: Synthetic polypeptide
RNLPVATPDPGMFPCLHHSQNLLRAVSNMLQKARQTLEFYPCTSEEIDHVDITKDKTSTVEACLPLELTKNESCLNSRETSFITNGSCLASRKTSFMMALCLSSIYEDLKMYQVEFKTMNAKLLMDPKRQIFLDQNMLAVIDELMQALNFNSETVPQKSSLEEPDFYKTKIKLCILLHAFRIRAVTIDRVMSYLNASGGGGSGGGGSGGGGSRVESKYGPPCPPCPAPEFEGGPSVFLFPPKPKDTLMISRTPEVTCVVVDVSQEDPEVQFNWYVDGVEVHNAKTKPREEQFNSTYRVVSVLTVLHQDWLNGKEYKCKVSNKGLPSSIEKTISKAKGQPREPRVYTLPPCQEEMTKNQVSLTCLVKGFYPSDIAVEWESNGQPENNYKTTPPVLVSDGSFTLYSRLTVDKSRWQEGNVFSCSVMHEALHNHYTQKSLSLSLG

SEQ ID NO: 23 - protein, 536 aa, Artificial Sequence
  Description of Artificial Sequence: Synthetic polypeptide
IWELKKDVYVVELDWYPDAPGEMVVLTCDTPEEDGITWTLDQSSEVLGSGKTLTIRVKEFGDAGQYTCHKGGEVLSHSLLLLHKKEDGIWSTDILKDQKEPKNKTFLRCEAKNYSGRFTCWWLTTISTDLTFSVKSSRGSSDPQGVTCGAATLSAERVRGDNKEYEYSVECQEDSACPAAEESLPIEVMVDAVHKLKYENYTSSFFIRDIIKPDPPKNLQLKPLKNSRQVEVSWEYPDTWSTPHSYFSLTFCVQVQGKSKREKKDRVFTDKTSATVICRKNASISVRAQDRYYSSSWSEWASVPCSRVESKYGPPCPPCPAPEFEGGPSVFLFPPKPKDTLMISRTPEVTCVVVDVSQEDPEVQFNWYVDGVEVHNAKTKPREEQFNSTYRVVSVLTVLHQDWLNGKEYKCKVSNKGLASSIEKTISKAKGQPREPQVCTLPPSQEEMTENQVSLTCLVKGFYPSDIAVEWESNGQPENNYKTTPPVLDSDGSFFLYSWLTVDKSRWQEGNVFSCSVMHEALHNHYTQKSLSLSLG

SEQ ID NO: 24 - protein, 442 aa, Artificial Sequence
  Description of Artificial Sequence: Synthetic polypeptide
RNLPVATPDPGMFPCLHHSQNLLRAVSNMLQKARQTLEFYPCTSEEIDHVDITKDKTSTVEACLPLELTKNESCLNSRETSFITNGSCLASRKTSFMMALCLSSIYEDLKMYQVEFKTMNAKLLMDPKRQIFLDQNMLAVIDELMQALNFNSETVPQKSSLEEPDFYKTKIKLCILLHAFRIRAVTIDRVMSYLNASGGGGSGGGGSGGGGSRVESKYGPPCPPCPAPEFEGGPSVFLFPPKPKDTLMISRTPEVTCVVVDVSQEDPEVQFNWYVDGVEVHNAKTKPREEQFNSTYRVVSVLTVLHQDWLNGKEYKCKVSNKGLASSIEKTISKAKGQPREPRVYTLPPCQEEMTKNQVSLTCLVKGFYPSDIAVEWESNGQPENNYKTTPPVLVSDGSFTLYSRLTVDKSRWQEGNVFSCSVMHEALHNHYTQKSLSLSLG

SEQ ID NO: 25 - protein, 536 aa, Artificial Sequence
  Description of Artificial Sequence: Synthetic polypeptide
IWELKKDVYVVELDWYPDAPGEMVVLTCDTPEEDGITWTLDQSSEVLGSGKTLTIRVKEFGDAGQYTCHKGGEVLSHSLLLLHKKEDGIWSTDILKDQKEPKNKTFLRCEAKNYSGRFTCWWLTTISTDLTFSVKSSRGSSDPQGVTCGAATLSAERVRGDNKEYEYSVECQEDSACPAAEESLPIEVMVDAVHKLKYENYTSSFFIRDIIKPDPPKNLQLKPLKNSRQVEVSWEYPDTWSTPHSYFSLTFCVQVQGKSKREKKDRVFTDKTSATVICRKNASISVRAQDRYYSSSWSEWASVPCSRVESKYGPPCPPCPAPEFEGGPSVFLFPPKPKDTLMISRTPEVTCVVVDVSQEDPEVQFNWYVDGVEVHNAKTKPREEQFNSTYRVVSVLTVLHQDWLNGKEYKCKVSNKGLGSSIEKTISKAKGQPREPQVCTLPPSQEEMTENQVSLTCLVKGFYPSDIAVEWESNGQPENNYKTTPPVLDSDGSFFLYSWLTVDKSRWQEGNVFSCSVMHEALHNHYTQKSLSLSLG

SEQ ID NO: 26 - protein, 442 aa, Artificial Sequence
  Description of Artificial Sequence: Synthetic polypeptide
RNLPVATPDPGMFPCLHHSQNLLRAVSNMLQKARQTLEFYPCTSEEIDHVDITKDKTSTVEACLPLELTKNESCLNSRETSFITNGSCLASRKTSFMMALCLSSIYEDLKMYQVEFKTMNAKLLMDPKRQIFLDQNMLAVIDELMQALNFNSETVPQKSSLEEPDFYKTKIKLCILLHAFRIRAVTIDRVMSYLNASGGGGSGGGGSGGGGSRVESKYGPPCPPCPAPEFEGGPSVFLFPPKPKDTLMISRTPEVTCVVVDVSQEDPEVQFNWYVDGVEVHNAKTKPREEQFNSTYRVVSVLTVLHQDWLNGKEYKCKVSNKGLGSSIEKTISKAKGQPREPRVYTLPPCQEEMTKNQVSLTCLVKGFYPSDIAVEWESNGQPENNYKTTPPVLVSDGSFTLYSRLTVDKSRWQEGNVFSCSVMHEALHNHYTQKSLSLSLG

SEQ ID NO: 27 - protein, 537 aa, Artificial Sequence
  Description of Artificial Sequence: Synthetic polypeptide
IWELKKDVYVVELDWYPDAPGEMVVLTCDTPEEDGITWTLDQSSEVLGSGKTLTIRVKEFGDAGQYTCHKGGEVLSHSLLLLHKKEDGIWSTDILKDQKEPKNKTFLRCEAKNYSGRFTCWWLTTISTDLTFSVKSSRGSSDPQGVTCGAATLSAERVRGDNKEYEYSVECQEDSACPAAEESLPIEVMVDAVHKLKYENYTSSFFIRDIIKPDPPKNLQLKPLKNSRQVEVSWEYPDTWSTPHSYFSLTFCVQVQGKSKREKKDRVFTDKTSATVICRKNASISVRAQDRYYSSSWSEWASVPCSEPKSSDKTHTCPPCPAPELLGGPSVFLFPPKPKDTLMISRTPEVTCVVVDVSHEDPEVKFNWYVDGVEVHNAKTKPREEQYNSTYRVVSVLTVLHQDWLNGKEYKCKVSNKALPAPIEKTISKAKGQPREPQVCTLPPSRDELTENQVSLTCLVKGFYPSDIAVEWESNGQPENNYKTTPPVLDSDGSFFLYSWLTVDKSRWQQGNVFSCSVMHEALHNHYTQKSLSLSPG

SEQ ID NO: 28 - protein, 443 aa, Artificial Sequence
  Description of Artificial Sequence: Synthetic polypeptide
RNLPVATPDPGMFPCLHHSQNLLRAVSNMLQKARQTLEFYPCTSEEIDHVDITKDKTSTVEACLPLELTKNESCLNSRETSFITNGSCLASRKTSFMMALCLSSIYEDLKMYQVEFKTMNAKLLMDPKRQIFLDQNMLAVIDELMQALNFNSETVPQKSSLEEPDFYKTKIKLCILLHAFRIRAVTIDRVMSYLNASGGGGSGGGGSGGGGSEPKSSDKTHTCPPCPAPELLGGPSVFLFPPKPKDTLMISRTPEVTCVVVDVSHEDPEVKFNWYVDGVEVHNAKTKPREEQYNSTYRVVSVLTVLHQDWLNGKEYKCKVSNKALPAPIEKTISKAKGQPREPRVYTLPPCRDELTKNQVSLTCLVKGFYPSDIAVEWESNGQPENNYKTTPPVLVSDGSFTLYSKLTVDKSRWQQGNVFSCSVMHEALHNHYTQKSLSLSPG

SEQ ID NO: 29 - protein, 537 aa, Artificial Sequence
  Description of Artificial Sequence: Synthetic polypeptide
IWELKKDVYVVELDWYPDAPGEMVVLTCDTPEEDGITWTLDQSSEVLGSGKTLTIRVKEFGDAGQYTCHKGGEVLSHSLLLLHKKEDGIWSTDILKDQKEPKNKTFLRCEAKNYSGRFTCWWLTTISTDLTFSVKSSRGSSDPQGVTCGAATLSAERVRGDNKEYEYSVECQEDSACPAAEESLPIEVMVDAVHKLKYENYTSSFFIRDIIKPDPPKNLQLKPLKNSRQVEVSWEYPDTWSTPHSYFSLTFCVQVQGKSKREKKDRVFTDKTSATVICRKNASISVRAQDRYYSSSWSEWASVPCSEPKSSDKTHTCPPCPAPEAAGGPSVFLFPPKPKDTLMISRTPEVTCVVVDVSHEDPEVKFNWYVDGVEVHNAKTKPREEQYNSTYRVVSVLTVLHQDWLNGKEYKCKVSNKALPAPIEKTISKAKGQPREPQVCTLPPSRDELTENQVSLTCLVKGFYPSDIAVEWESNGQPENNYKTTPPVLDSDGSFFLYSWLTVDKSRWQQGNVFSCSVMHEALHNHYTQKSLSLSPG

SEQ ID NO: 30 - protein, 443 aa, Artificial Sequence
  Description of Artificial Sequence: Synthetic polypeptide
RNLPVATPDPGMFPCLHHSQNLLRAVSNMLQKARQTLEFYPCTSEEIDHVDITKDKTSTVEACLPLELTKNESCLNSRETSFITNGSCLASRKTSFMMALCLSSIYEDLKMYQVEFKTMNAKLLMDPKRQIFLDQNMLAVIDELMQALNFNSETVPQKSSLEEPDFYKTKIKLCILLHAFRIRAVTIDRVMSYLNASGGGGSGGGGSGGGGSEPKSSDKTHTCPPCPAPEAAGGPSVFLFPPKPKDTLMISRTPEVTCVVVDVSHEDPEVKFNWYVDGVEVHNAKTKPREEQYNSTYRVVSVLTVLHQDWLNGKEYKCKVSNKALPAPIEKTISKAKGQPREPRVYTLPPCRDELTKNQVSLTCLVKGFYPSDIAVEWESNGQPENNYKTTPPVLVSDGSFTLYSKLTVDKSRWQQGNVFSCSVMHEALHNHYTQKSLSLSPG

SEQ ID NO: 31 - protein, 537 aa, Artificial Sequence
  Description of Artificial Sequence: Synthetic polypeptide
IWELKKDVYVVELDWYPDAPGEMVVLTCDTPEEDGITWTLDQSSEVLGSGKTLTIRVKEFGDAGQYTCHKGGEVLSHSLLLLHKKEDGIWSTDILKDQKEPKNKTFLRCEAKNYSGRFTCWWLTTISTDLTFSVKSSRGSSDPQGVTCGAATLSAERVRGDNKEYEYSVECQEDSACPAAEESLPIEVMVDAVHKLKYENYTSSFFIRDIIKPDPPKNLQLKPLKNSRQVEVSWEYPDTWSTPHSYFSLTFCVQVQGKSKREKKDRVFTDKTSATVICRKNASISVRAQDRYYSSSWSEWASVPCSEPKSSDKTHTCPPCPAPEAAGGPSVFLFPPKPKDTLMISRTPEVTCVVVDVSHEDPEVKFNWYVDGVEVHNAKTKPREEQYNSTYRVVSVLTVLHQDWLNGKEYKCKVSNKALAAPIEKTISKAKGQPREPQVCTLPPSRDELTENQVSLTCLVKGFYPSDIAVEWESNGQPENNYKTTPPVLDSDGSFFLYSWLTVDKSRWQQGNVFSCSVMHEALHNHYTQKSLSLSPG

SEQ ID NO: 32 - protein, 443 aa, Artificial Sequence
  Description of Artificial Sequence: Synthetic polypeptide
RNLPVATPDPGMFPCLHHSQNLLRAVSNMLQKARQTLEFYPCTSEEIDHVDITKDKTSTVEACLPLELTKNESCLNSRETSFITNGSCLASRKTSFMMALCLSSIYEDLKMYQVEFKTMNAKLLMDPKRQIFLDQNMLAVIDELMQALNFNSETVPQKSSLEEPDFYKTKIKLCILLHAFRIRAVTIDRVMSYLNASGGGGSGGGGSGGGGSEPKSSDKTHTCPPCPAPEAAGGPSVFLFPPKPKDTLMISRTPEVTCVVVDVSHEDPEVKFNWYVDGVEVHNAKTKPREEQYNSTYRVVSVLTVLHQDWLNGKEYKCKVSNKALAAPIEKTISKAKGQPREPRVYTLPPCRDELTKNQVSLTCLVKGFYPSDIAVEWESNGQPENNYKTTPPVLVSDGSFTLYSKLTVDKSRWQQGNVFSCSVMHEALHNHYTQKSLSLSPG

SEQ ID NO: 33 - protein, 537 aa, Artificial Sequence
  Description of Artificial Sequence: Synthetic polypeptide
IWELKKDVYVVELDWYPDAPGEMVVLTCDTPEEDGITWTLDQSSEVLGSGKTLTIRVKEFGDAGQYTCHKGGEVLSHSLLLLHKKEDGIWSTDILKDQKEPKNKTFLRCEAKNYSGRFTCWWLTTISTDLTFSVKSSRGSSDPQGVTCGAATLSAERVRGDNKEYEYSVECQEDSACPAAEESLPIEVMVDAVHKLKYENYTSSFFIRDIIKPDPPKNLQLKPLKNSRQVEVSWEYPDTWSTPHSYFSLTFCVQVQGKSKREKKDRVFTDKTSATVICRKNASISVRAQDRYYSSSWSEWASVPCSEPKSSDKTHTCPPCPAPEAAGGPSVFLFPPKPKDTLMISRTPEVTCVVVDVSHEDPEVKFNWYVDGVEVHNAKTKPREEQYNSTYRVVSVLTVLHQDWLNGKEYKCKVSNKALGAPIEKTISKAKGQPREPQVCTLPPSRDELTENQVSLTCLVKGFYPSDIAVEWESNGQPENNYKTTPPVLDSDGSFFLYSWLTVDKSRWQQGNVFSCSVMHEALHNHYTQKSLSLSPG

SEQ ID NO: 34 - protein, 443 aa, Artificial Sequence
  Description of Artificial Sequence: Synthetic polypeptide
RNLPVATPDPGMFPCLHHSQNLLRAVSNMLQKARQTLEFYPCTSEEIDHVDITKDKTSTVEACLPLELTKNESCLNSRETSFITNGSCLASRKTSFMMALCLSSIYEDLKMYQVEFKTMNAKLLMDPKRQIFLDQNMLAVIDELMQALNFNSETVPQKSSLEEPDFYKTKIKLCILLHAFRIRAVTIDRVMSYLNASGGGGSGGGGSGGGGSEPKSSDKTHTCPPCPAPEAAGGPSVFLFPPKPKDTLMISRTPEVTCVVVDVSHEDPEVKFNWYVDGVEVHNAKTKPREEQYNSTYRVVSVLTVLHQDWLNGKEYKCKVSNKALGAPIEKTISKAKGQPREPRVYTLPPCRDELTKNQVSLTCLVKGFYPSDIAVEWESNGQPENNYKTTPPVLVSDGSFTLYSKLTVDKSRWQQGNVFSCSVMHEALHNHYTQKSLSLSPG

SEQ ID NO: 35 - protein, 537 aa, Artificial Sequence
  Description of Artificial Sequence: Synthetic polypeptide
IWELKKDVYVVELDWYPDAPGEMVVLTCDTPEEDGITWTLDQSSEVLGSGKTLTIRVKEFGDAGQYTCHKGGEVLSHSLLLLHKKEDGIWSTDILKDQKEPKNKTFLRCEAKNYSGRFTCWWLTTISTDLTFSVKSSRGSSDPQGVTCGAATLSAERVRGDNKEYEYSVECQEDSACPAAEESLPIEVMVDAVHKLKYENYTSSFFIRDIIKPDPPKNLQLKPLKNSRQVEVSWEYPDTWSTPHSYFSLTFCVQVQGKSKREKKDRVFTDKTSATVICRKNASISVRAQDRYYSSSWSEWASVPCSEPKSSDKTHTCPPCPAPEAEGAPSVFLFPPKPKDTLMISRTPEVTCVVVDVSHEDPEVKFNWYVDGVEVHNAKTKPREEQYNSTYRVVSVLTVLHQDWLNGKEYKCKVSNKALPSSIEKTISKAKGQPREPQVCTLPPSRDELTENQVSLTCLVKGFYPSDIAVEWESNGQPENNYKTTPPVLDSDGSFFLYSWLTVDKSRWQQGNVFSCSVMHEALHNHYTQKSLSLSPG

SEQ ID NO: 36 - protein, 443 aa, Artificial Sequence
  Description of Artificial Sequence: Synthetic polypeptide
RNLPVATPDPGMFPCLHHSQNLLRAVSNMLQKARQTLEFYPCTSEEIDHVDITKDKTSTVEACLPLELTKNESCLNSRETSFITNGSCLASRKTSFMMALCLSSIYEDLKMYQVEFKTMNAKLLMDPKRQIFLDQNMLAVIDELMQALNFNSETVPQKSSLEEPDFYKTKIKLCILLHAFRIRAVTIDRVMSYLNASGGGGSGGGGSGGGGSEPKSSDKTHTCPPCPAPEAEGAPSVFLFPPKPKDTLMISRTPEVTCVVVDVSHEDPEVKFNWYVDGVEVHNAKTKPREEQYNSTYRVVSVLTVLHQDWLNGKEYKCKVSNKALPSSIEKTISKAKGQPREPRVYTLPPCRDELTKNQVSLTCLVKGFYPSDIAVEWESNGQPENNYKTTPPVLVSDGSFTLYSKLTVDKSRWQQGNVFSCSVMHEALHNHYTQKSLSLSPG

SEQ ID NO: 37 - protein, 536 aa, Artificial Sequence; identical to SEQ ID NO: 17
  Description of Artificial Sequence: Synthetic polypeptide

SEQ ID NO: 38 - protein, 427 aa, Artificial Sequence
  Description of Artificial Sequence: Synthetic polypeptide
RNLPVATPDPGMFPCLHHSQNLLRAVSNMLQKARQTLEFYPCTSEEIDHVDITKDKTSTVEACLPLELTKNESCLNSRETSFITNGSCLASRKTSFMMALCLSSIYEDLKMYQVEFKTMNAKLLMDPKRQIFLDQNMLAVIDELMQALNFNSETVPQKSSLEEPDFYKTKIKLCILLHAFRIRAVTIDRVMSYLNASRVESKYGPPCPPCPAPEFLGGPSVFLFPPKPKDTLMISRTPEVTCVVVDVSQEDPEVQFNWYVDGVEVHNAKTKPREEQFNSTYRVVSVLTVLHQDWLNGKEYKCKVSNKGLPSSIEKTISKAKGQPREPQVYTLPPCQENMTKNQVSLTCLVKGFYPSDIAVEWESNGQPENNYKTTPPVLVSDGSFTLYSRLTVDKSRWQEGNVFSCSVMHEALHNHYTQKSLSLSLG

SEQ ID NO: 39 - protein, 536 aa, Artificial Sequence; identical to SEQ ID NO: 17
  Description of Artificial Sequence: Synthetic polypeptide

SEQ ID NO: 40 - protein, 432 aa, Artificial Sequence
  Description of Artificial Sequence: Synthetic polypeptide
RNLPVATPDPGMFPCLHHSQNLLRAVSNMLQKARQTLEFYPCTSEEIDHVDITKDKTSTVEACLPLELTKNESCLNSRETSFITNGSCLASRKTSFMMALCLSSIYEDLKMYQVEFKTMNAKLLMDPKRQIFLDQNMLAVIDELMQALNFNSETVPQKSSLEEPDFYKTKIKLCILLHAFRIRAVTIDRVMSYLNASGGGGSRVESKYGPPCPPCPAPEFLGGPSVFLFPPKPKDTLMISRTPEVTCVVVDVSQEDPEVQFNWYVDGVEVHNAKTKPREEQFNSTYRVVSVLTVLHQDWLNGKEYKCKVSNKGLPSSIEKTISKAKGQPREPQVYTLPPCQENMTKNQVSLTCLVKGFYPSDIAVEWESNGQPENNYKTTPPVLVSDGSFTLYSRLTVDKSRWQEGNVFSCSVMHEALHNHYTQKSLSLSLG

SEQ ID NO: 41 - protein, 536 aa, Artificial Sequence; identical to SEQ ID NO: 17
  Description of Artificial Sequence: Synthetic polypeptide

SEQ ID NO: 42 - protein, 437 aa, Artificial Sequence
  Description of Artificial Sequence: Synthetic polypeptide
RNLPVATPDPGMFPCLHHSQNLLRAVSNMLQKARQTLEFYPCTSEEIDHVDITKDKTSTVEACLPLELTKNESCLNSRETSFITNGSCLASRKTSFMMALCLSSIYEDLKMYQVEFKTMNAKLLMDPKRQIFLDQNMLAVIDELMQALNFNSETVPQKSSLEEPDFYKTKIKLCILLHAFRIRAVTIDRVMSYLNASGGGGSGGGGSRVESKYGPPCPPCPAPEFLGGPSVFLFPPKPKDTLMISRTPEVTCVVVDVSQEDPEVQFNWYVDGVEVHNAKTKPREEQFNSTYRVVSVLTVLHQDWLNGKEYKCKVSNKGLPSSIEKTISKAKGQPREPQVYTLPPCQENMTKNQVSLTCLVKGFYPSDIAVEWESNGQPENNYKTTPPVLVSDGSFTLYSRLTVDKSRWQEGNVFSCSVMHEALHNHYTQKSLSLSLG

SEQ ID NO: 43 - protein, 537 aa, Artificial Sequence; identical to SEQ ID NO: 27
  Description of Artificial Sequence: Synthetic polypeptide

SEQ ID NO: 44 - protein, 428 aa, Artificial Sequence
  Description of Artificial Sequence: Synthetic polypeptide
RNLPVATPDPGMFPCLHHSQNLLRAVSNMLQKARQTLEFYPCTSEEIDHVDITKDKTSTVEACLPLELTKNESCLNSRETSFITNGSCLASRKTSFMMALCLSSIYEDLKMYQVEFKTMNAKLLMDPKRQIFLDQNMLAVIDELMQALNFNSETVPQKSSLEEPDFYKTKIKLCILLHAFRIRAVTIDRVMSYLNASEPKSSDKTHTCPPCPAPELLGGPSVFLFPPKPKDTLMISRTPEVTCVVVDVSHEDPEVKFNWYVDGVEVHNAKTKPREEQYNSTYRVVSVLTVLHQDWLNGKEYKCKVSNKALPAPIEKTISKAKGQPREPRVYTLPPCRDELTKNQVSLTCLVKGFYPSDIAVEWESNGQPENNYKTTPPVLVSDGSFTLYSKLTVDKSRWQQGNVFSCSVMHEALHNHYTQKSLSLSPG

SEQ ID NO: 45 - protein, 537 aa, Artificial Sequence; identical to SEQ ID NO: 27
  Description of Artificial Sequence: Synthetic polypeptide

SEQ ID NO: 46 - protein, 433 aa, Artificial Sequence
  Description of Artificial Sequence: Synthetic polypeptide
RNLPVATPDPGMFPCLHHSQNLLRAVSNMLQKARQTLEFYPCTSEEIDHVDITKDKTSTVEACLPLELTKNESCLNSRETSFITNGSCLASRKTSFMMALCLSSIYEDLKMYQVEFKTMNAKLLMDPKRQIFLDQNMLAVIDELMQALNFNSETVPQKSSLEEPDFYKTKIKLCILLHAFRIRAVTIDRVMSYLNASGGGGSEPKSSDKTHTCPPCPAPELLGGPSVFLFPPKPKDTLMISRTPEVTCVVVDVSHEDPEVKFNWYVDGVEVHNAKTKPREEQYNSTYRVVSVLTVLHQDWLNGKEYKCKVSNKALPAPIEKTISKAKGQPREPRVYTLPPCRDELTKNQVSLTCLVKGFYPSDIAVEWESNGQPENNYKTTPPVLVSDGSFTLYSKLTVDKSRWQQGNVFSCSVMHEALHNHYTQKSLSLSPG

SEQ ID NO: 47 - protein, 537 aa, Artificial Sequence; identical to SEQ ID NO: 27
  Description of Artificial Sequence: Synthetic polypeptide

SEQ ID NO: 48 - protein, 438 aa, Artificial Sequence
  Description of Artificial Sequence: Synthetic polypeptide
RNLPVATPDPGMFPCLHHSQNLLRAVSNMLQKARQTLEFYPCTSEEIDHVDITKDKTSTVEACLPLELTKNESCLNSRETSFITNGSCLASRKTSFMMALCLSSIYEDLKMYQVEFKTMNAKLLMDPKRQIFLDQNMLAVIDELMQALNFNSETVPQKSSLEEPDFYKTKIKLCILLHAFRIRAVTIDRVMSYLNASGGGGSGGGGSEPKSSDKTHTCPPCPAPELLGGPSVFLFPPKPKDTLMISRTPEVTCVVVDVSHEDPEVKFNWYVDGVEVHNAKTKPREEQYNSTYRVVSVLTVLHQDWLNGKEYKCKVSNKALPAPIEKTISKAKGQPREPRVYTLPPCRDELTKNQVSLTCLVKGFYPSDIAVEWESNGQPENNYKTTPPVLVSDGSFTLYSKLTVDKSRWQQGNVFSCSVMHEALHNHYTQKSLSLSPG

SEQ ID NO: 49 - protein, 443 aa, Artificial Sequence
  Description of Artificial Sequence: Synthetic polypeptide
RNLPVATPDPGMFPCLHHSQNLLRAVSNMLQKARQTLEFYPCTSEEIDHVDITKDKTSTVEACLPLELTKNESCLNSRETSFITNGSCLASRKTSFMMALCLSSIYEDLKMYQVEFKTMNAKLLMDPKRQIFLDQNMLAVIDELMQALNFNSETVPQKSSLEEPDFYKTKIKLCILLHAFRIRAVTIDRVMSYLNASGGGGSGGGGSGGGGSEPKSSDKTHTCPPCPAPELLGGPSVFLFPPKPKDTLMISRTPEVTCVVVDVSHEDPEVKFNWYVDGVEVHNAKTKPREEQYNSTYRVVSVLTVLHQDWLNGKEYKCKVSNKALPAPIEKTISKAKGQPREPQVCTLPPSRDELTENQVSLTCLVKGFYPSDIAVEWESNGQPENNYKTTPPVLDSDGSFFLYSWLTVDKSRWQQGNVFSCSVMHEALHNHYTQKSLSLSPG

SEQ ID NO: 50 - protein, 537 aa, Artificial Sequence
  Description of Artificial Sequence: Synthetic polypeptide
IWELKKDVYVVELDWYPDAPGEMVVLTCDTPEEDGITWTLDQSSEVLGSGKTLTIRVKEFGDAGQYTCHKGGEVLSHSLLLLHKKEDGIWSTDILKDQKEPKNKTFLRCEAKNYSGRFTCWWLTTISTDLTFSVKSSRGSSDPQGVTCGAATLSAERVRGDNKEYEYSVECQEDSACPAAEESLPIEVMVDAVHKLKYENYTSSFFIRDIIKPDPPKNLQLKPLKNSRQVEVSWEYPDTWSTPHSYFSLTFCVQVQGKSKREKKDRVFTDKTSATVICRKNASISVRAQDRYYSSSWSEWASVPCSEPKSSDKTHTCPPCPAPELLGGPSVFLFPPKPKDTLMISRTPEVTCVVVDVSHEDPEVKFNWYVDGVEVHNAKTKPREEQYNSTYRVVSVLTVLHQDWLNGKEYKCKVSNKALPAPIEKTISKAKGQPREPRVYTLPPCRDELTKNQVSLTCLVKGFYPSDIAVEWESNGQPENNYKTTPPVLVSDGSFTLYSKLTVDKSRWQQGNVFSCSVMHEALHNHYTQKSLSLSPG

SEQ ID NO: 51 - protein, 542 aa, Artificial Sequence
  Description of Artificial Sequence: Synthetic polypeptide
IWELKKDVYVVELDWYPDAPGEMVVLTCDTPEEDGITWTLDQSSEVLGSGKTLTIRVKEFGDAGQYTCHKGGEVLSHSLLLLHKKEDGIWSTDILKDQKEPKNKTFLRCEAKNYSGRFTCWWLTTISTDLTFSVKSSRGSSDPQGVTCGAATLSAERVRGDNKEYEYSVECQEDSACPAAEESLPIEVMVDAVHKLKYENYTSSFFIRDIIKPDPPKNLQLKPLKNSRQVEVSWEYPDTWSTPHSYFSLTFCVQVQGKSKREKKDRVFTDKTSATVICRKNASISVRAQDRYYSSSWSEWASVPCSGGGGSEPKSSDKTHTCPPCPAPELLGGPSVFLFPPKPKDTLMISRTPEVTCVVVDVSHEDPEVKFNWYVDGVEVHNAKTKPREEQYNSTYRVVSVLTVLHQDWLNGKEYKCKVSNKALPAPIEKTISKAKGQPREPQVCTLPPSRDELTENQVSLTCLVKGFYPSDIAVEWESNGQPENNYKTTPPVLDSDGSFFLYSWLTVDKSRWQQGNVFSCSVMHEALHNHYTQKSLSLSPG

SEQ ID NO: 52 - protein, 433 aa, Artificial Sequence; identical to SEQ ID NO: 46
  Description of Artificial Sequence: Synthetic polypeptide

SEQ ID NO: 53 - protein, 542 aa, Artificial Sequence
  Description of Artificial Sequence: Synthetic polypeptide
IWELKKDVYVVELDWYPDAPGEMVVLTCDTPEEDGITWTLDQSSEVLGSGKTLTIRVKEFGDAGQYTCHKGGEVLSHSLLLLHKKEDGIWSTDILKDQKEPKNKTFLRCEAKNYSGRFTCWWLTTISTDLTFSVKSSRGSSDPQGVTCGAATLSAERVRGDNKEYEYSVECQEDSASPAAEESLPIEVMVDAVHKLKYENYTSSFFIRDIIKPDPPKNLQLKPLKNSRQVEVSWEYPDTWSTPHSYFSLTFCVQVQGKSKREKKDRVFTDKTSATVICRKNASISVRAQDRCYSSSWSEWASVPCSGGGGSEPKSSDKTHTCPPCPAPELLGGPSVFLFPPKPKDTLMISRTPEVTCVVVDVSHEDPEVKFNWYVDGVEVHNAKTKPREEQYNSTYRVVSVLTVLHQDWLNGKEYKCKVSNKALPAPIEKTISKAKGQPREPQVCTLPPSRDELTENQVSLTCLVKGFYPSDIAVEWESNGQPENNYKTTPPVLDSDGSFFLYSWLTVDKSRWQQGNVFSCSVMHEALHNHYTQKSLSLSPG

SEQ ID NO: 54 - protein, 433 aa, Artificial Sequence
  Description of Artificial Sequence: Synthetic polypeptide
RNLPVATPDPGMFPCLHHSQNLLRAVSNMLQKARQTLEFYPCTSEEIDHVDITKDKTSTVEACLPLELTKNESSLNSRETSFITNGSCLASRKTSFMMALCLSSIYEDLKMYQVEFKTMNAKLLMDPKRQIFLDQNMLAVIDELMQALNFNSETVPQKSSLEEPDFYKTKIKLCILLHAFRIRACTIDRVMSYLNASGGGGSEPKSSDKTHTCPPCPAPELLGGPSVFLFPPKPKDTLMISRTPEVTCVVVDVSHEDPEVKFNWYVDGVEVHNAKTKPREEQYNSTYRVVSVLTVLHQDWLNGKEYKCKVSNKALPAPIEKTISKAKGQPREPRVYTLPPCRDELTKNQVSLTCLVKGFYPSDIAVEWESNGQPENNYKTTPPVLVSDGSFTLYSKLTVDKSRWQQGNVFSCSVMHEALHNHYTQKSLSLSPG

SEQ ID NO: 55 - protein, 536 aa, Artificial Sequence
  Description of Artificial Sequence: Synthetic polypeptide
IWELKKDVYVVELDWYPDAPGEMVVLTCDTPEEDGITWTLDQSSEVLGSGKTLTIRVKEFGDAGQYTCHKGGEVLSHSLLLLHKKEDGIWSTDILKDQKEPKNKTFLRCEAKNYSGRFTCWWLTTISTDLTFSVKSSRGSSDPQGVTCGAATLSAERVRGDNKEYEYSVECQEDSACPAAEESLPIEVMVDAVHKLKYENYTSSFFIRDIIKPDPPKNLQLKPLKNSRQVEVSWEYPDTWSTPHSYFSLTFCVQVQGKSKREKKDRVFTDKTSATVICRKNASISVRAQDRCYSSSWSEWASVPCSRVESKYGPPCPPCPAPEFLGGPSVFLFPPKPKDTLMISRTPEVTCVVVDVSQEDPEVQFNWYVDGVEVHNAKTKPREEQFNSTYRVVSVLTVLHQDWLNGKEYKCKVSNKGLPSSIEKTISKAKGQPREPQVCTLPPSQEEMTKNQVSLTCLVEGFYPSDIAVEWESNGQPENNYKTTPPVLDSDGSFFLYSWLTVDKSRWQEGNVFSCSVMHEALHNHYTQKSLSLSLG

SEQ ID NO: 56 - protein, 442 aa, Artificial Sequence
  Description of Artificial Sequence: Synthetic polypeptide
RNLPVATPDPGMFPCLHHSQNLLRAVSNMLQKARQTLEFYPCTSEEIDHVDITKDKTSTVEACLPLELTKNESCLNSRETSFITNGSCLASRKTSFMMALCLSSIYEDLKMYQVEFKTMNAKLLMDPKRQIFLDQNMLAVIDELMQALNFNSETVPQKSSLEEPDFYKTKIKLCILLHAFRIRACTIDRVMSYLNASGGGGSGGGGSGGGGSRVESKYGPPCPPCPAPEFLGGPSVFLFPPKPKDTLMISRTPEVTCVVVDVSQEDPEVQFNWYVDGVEVHNAKTKPREEQFNSTYRVVSVLTVLHQDWLNGKEYKCKVSNKGLPSSIEKTISKAKGQPREPQVYTLPPCQENMTKNQVSLTCLVKGFYPSDIAVEWESNGQPENNYKTTPPVLVSDGSFTLYSRLTVDKSRWQEGNVFSCSVMHEALHNHYTQKSLSLSLG

SEQ ID NO: 57 - protein, 537 aa, Artificial Sequence
  Description of Artificial Sequence: Synthetic polypeptide
IWELKKDVYVVELDWYPDAPGEMVVLTCDTPEEDGITWTLDQSSEVLGSGKTLTIRVKEFGDAGQYTCHKGGEVLSHSLLLLHKKEDGIWSTDILKDQKEPKNKTFLRCEAKNYSGRFTCWWLTTISTDLTFSVKSSRGSSDPQGVTCGAATLSAERVRGDNKEYEYSVECQEDSACPAAEESLPIEVMVDAVHKLKYENYTSSFFIRDIIKPDPPKNLQLKPLKNSRQVEVSWEYPDTWSTPHSYFSLTFCVQVQGKSKREKKDRVFTDKTSATVICRKNASISVRAQDRCYSSSWSEWASVPCSEPKSSDKTHTCPPCPAPEAAGGPSVFLFPPKPKDTLMISRTPEVTCVVVDVSHEDPEVKFNWYVDGVEVHNAKTKPREEQYNSTYRVVSVLTVLHQDWLNGKEYKCKVSNKALPAPIEKTISKAKGQPREPQVCTLPPSRDELTENQVSLTCLVKGFYPSDIAVEWESNGQPENNYKTTPPVLDSDGSFFLYSWLTVDKSRWQQGNVFSCSVMHEALHNHYTQKSLSLSPG

SEQ ID NO: 58 - protein, 443 aa, Artificial Sequence
  Description of Artificial Sequence: Synthetic polypeptide
RNLPVATPDPGMFPCLHHSQNLLRAVSNMLQKARQTLEFYPCTSEEIDHVDITKDKTSTVEACLPLELTKNESCLNSRETSFITNGSCLASRKTSFMMALCLSSIYEDLKMYQVEFKTMNAKLLMDPKRQIFLDQNMLAVIDELMQALNFNSETVPQKSSLEEPDFYKTKIKLCILLHAFRIRACTIDRVMSYLNASGGGGSGGGGSGGGGSEPKSSDKTHTCPPCPAPEAAGGPSVFLFPPKPKDTLMISRTPEVTCVVVDVSHEDPEVKFNWYVDGVEVHNAKTKPREEQYNSTYRVVSVLTVLHQDWLNGKEYKCKVSNKALPAPIEKTISKAKGQPREPRVYTLPPCRDELTKNQVSLTCLVKGFYPSDIAVEWESNGQPENNYKTTPPVLVSDGSFTLYSKLTVDKSRWQQGNVFSCSVMHEALHNHYTQKSLSLSPG

SEQ ID NO: 59 - protein, 537 aa, Artificial Sequence
  Description of Artificial Sequence: Synthetic polypeptide
IWELKKDVYVVELDWYPDAPGEMVVLTCDTPEEDGITWTLDQSSEVLGSGKTLTIRVKEFGDAGQYTCHKGGEVLSHSLLLLHKKEDGIWSTDILKDQKEPKNKTFLRCEAKNYSGRFTCWWLTTISTDLTFSVKSSRGSSDPQGVTCGAATLSAERVRGDNKEYEYSVECQEDSACPAAEESLPIEVMVDAVHKLKYENYTSSFFIRDIIKPDPPKNLQLKPLKNSRQVEVSWEYPDTWSTPHSYFSLTFCVQVQGKSKREKKDRVFTDKTSATVICRKNASISVRAQDRCYSSSWSEWASVPCSEPKSSDKTHTCPPCPAPEAAGGPSVFLFPPKPKDTLMISRTPEVTCVVVDVSHEDPEVKFNWYVDGVEVHNAKTKPREEQYNSTYRVVSVLTVLHQDWLNGKEYKCKVSNKALAAPIEKTISKAKGQPREPQVCTLPPSRDELTENQVSLTCLVKGFYPSDIAVEWESNGQPENNYKTTPPVLDSDGSFFLYSWLTVDKSRWQQGNVFSCSVMHEALHNHYTQKSLSLSPG

SEQ ID NO: 60 - protein, 443 aa, Artificial Sequence
  Description of Artificial Sequence: Synthetic polypeptide
RNLPVATPDPGMFPCLHHSQNLLRAVSNMLQKARQTLEFYPCTSEEIDHVDITKDKTSTVEACLPLELTKNESCLNSRETSFITNGSCLASRKTSFMMALCLSSIYEDLKMYQVEFKTMNAKLLMDPKRQIFLDQNMLAVIDELMQALNFNSETVPQKSSLEEPDFYKTKIKLCILLHAFRIRACTIDRVMSYLNASGGGGSGGGGSGGGGSEPKSSDKTHTCPPCPAPEAAGGPSVFLFPPKPKDTLMISRTPEVTCVVVDVSHEDPEVKFNWYVDGVEVHNAKTKPREEQYNSTYRVVSVLTVLHQDWLNGKEYKCKVSNKALAAPIEKTISKAKGQPREPRVYTLPPCRDELTKNQVSLTCLVKGFYPSDIAVEWESNGQPENNYKTTPPVLVSDGSFTLYSKLTVDKSRWQQGNVFSCSVMHEALHNHYTQKSLSLSPG

SEQ ID NO: 61 - protein, 537 aa, Artificial Sequence
  Description of Artificial Sequence: Synthetic polypeptide
IWELKKDVYVVELDWYPDAPGEMVVLTCDTPEEDGITWTLDQSSEVLGSGKTLTIRVKEFGDAGQYTCHKGGEVLSHSLLLLHKKEDGIWSTDILKDQKEPKNKTFLRCEAKNYSGRFTCWWLTTISTDLTFSVKSSRGSSDPQGVTCGAATLSAERVRGDNKEYEYSVECQEDSACPAAEESLPIEVMVDAVHKLKYENYTSSFFIRDIIKPDPPKNLQLKPLKNSRQVEVSWEYPDTWSTPHSYFSLTFCVQVQGKSKREKKDRVFTDKTSATVICRKNASISVRAQDRCYSSSWSEWASVPCSEPKSSDKTHTCPPCPAPEAEGAPSVFLFPPKPKDTLMISRTPEVTCVVVDVSHEDPEVKFNWYVDGVEVHNAKTKPREEQYNSTYRVVSVLTVLHQDWLNGKEYKCKVSNKALPSSIEKTISKAKGQPREPQVCTLPPSRDELTENQVSLTCLVKGFYPSDIAVEWESNGQPENNYKTTPPVLDSDGSFFLYSWLTVDKSRWQQGNVFSCSVMHEALHNHYTQKSLSLSPG

SEQ ID NO: 62 - protein, 443 aa, Artificial Sequence
  Description of Artificial Sequence: Synthetic polypeptide
RNLPVATPDPGMFPCLHHSQNLLRAVSNMLQKARQTLEFYPCTSEEIDHVDITKDKTSTVEACLPLELTKNESCLNSRETSFITNGSCLASRKTSFMMALCLSSIYEDLKMYQVEFKTMNAKLLMDPKRQIFLDQNMLAVIDELMQALNFNSETVPQKSSLEEPDFYKTKIKLCILLHAFRIRACTIDRVMSYLNASGGGGSGGGGSGGGGSEPKSSDKTHTCPPCPAPEAEGAPSVFLFPPKPKDTLMISRTPEVTCVVVDVSHEDPEVKFNWYVDGVEVHNAKTKPREEQYNSTYRVVSVLTVLHQDWLNGKEYKCKVSNKALPSSIEKTISKAKGQPREPRVYTLPPCRDELTKNQVSLTCLVKGFYPSDIAVEWESNGQPENNYKTTPPVLVSDGSFTLYSKLTVDKSRWQQGNVFSCSVMHEALHNHYTQKSLSLSPG

SEQ ID NO: 63 - protein, 26 aa, Artificial Sequence
  Description of Artificial Sequence: Synthetic peptide
GGGGSRVESKYGPPCPPCPAPEFEGG

SEQ ID NO: 64 - protein, 31 aa, Artificial Sequence
  Description of Artificial Sequence: Synthetic polypeptide
GGGGSGGGGSRVESKYGPPCPPCPAPEFEGG

SEQ ID NO: 65 - protein, 27 aa, Artificial Sequence
  Description of Artificial Sequence: Synthetic peptide
GGGGSEPKSSDKTHTCPPCPAPEAAGG

SEQ ID NO: 66 - protein, 32 aa, Artificial Sequence
  Description of Artificial Sequence: Synthetic polypeptide
GGGGSGGGGSEPKSSDKTHTCPPCPAPEAAGG

SEQ ID NO: 67 - protein, 27 aa, Artificial Sequence
  Description of Artificial Sequence: Synthetic peptide
GGGGSEPKSSDKTHTCPPCPAPEAEGA

SEQ ID NO: 68 - protein, 32 aa, Artificial Sequence
  Description of Artificial Sequence: Synthetic polypeptide
GGGGSGGGGSEPKSSDKTHTCPPCPAPEAEGA

SEQ ID NO: 69 - protein, 536 aa, Artificial Sequence
  Description of Artificial Sequence: Synthetic polypeptide
IWELKKDVYVVELDWYPDAPGEMVVLTCDTPEEDGITWTLDQSSEVLGSGKTLTIRVKEFGDAGQYTCHKGGEVLSHSLLLLHKKEDGIWSTDILKDQKEPKNKTFLRCEAKNYSGRFTCWWLTTISTDLTFSVKSSRGSSDPQGVTCGAATLSAERVRGDNKEYEYSVECQEDSASPAAEESLPIEVMVDAVHKLKYENYTSSFFIRDIIKPDPPKNLQLKPLKNSRQVEVSWEYPDTWSTPHSYFSLTFCVQVQGKSKREKKDRVFTDKTSATVICRKNASISVRAQDRCYSSSWSEWASVPCSRVESKYGPPCPPCPAPEFLGGPSVFLFPPKPKDTLMISRTPEVTCVVVDVSQEDPEVQFNWYVDGVEVHNAKTKPREEQFNSTYRVVSVLTVLHQDWLNGKEYKCKVSNKGLPSSIEKTISKAKGQPREPQVCTLPPSQEEMTKNQVSLTCLVEGFYPSDIAVEWESNGQPENNYKTTPPVLDSDGSFFLYSWLTVDKSRWQEGNVFSCSVMHEALHNHYTQKSLSLSLG

SEQ ID NO: 70 - protein, 442 aa, Artificial Sequence
  Description of Artificial Sequence: Synthetic polypeptide
RNLPVATPDPGMFPCLHHSQNLLRAVSNMLQKARQTLEFYPCTSEEIDHVDITKDKTSTVEACLPLELTKNESSLNSRETSFITNGSCLASRKTSFMMALCLSSIYEDLKMYQVEFKTMNAKLLMDPKRQIFLDQNMLAVIDELMQALNFNSETVPQKSSLEEPDFYKTKIKLCILLHAFRIRACTIDRVMSYLNASGGGGSGGGGSGGGGSRVESKYGPPCPPCPAPEFLGGPSVFLFPPKPKDTLMISRTPEVTCVVVDVSQEDPEVQFNWYVDGVEVHNAKTKPREEQFNSTYRVVSVLTVLHQDWLNGKEYKCKVSNKGLPSSIEKTISKAKGQPREPQVYTLPPCQENMTKNQVSLTCLVKGFYPSDIAVEWESNGQPENNYKTTPPVLVSDGSFTLYSRLTVDKSRWQEGNVFSCSVMHEALHNHYTQKSLSLSLG

SEQ ID NO: 71 - protein, 536 aa, Artificial Sequence
  Description of Artificial Sequence: Synthetic polypeptide
IWELKKDVYVVELDWYPDAPGEMVVLTCDTPEEDGITWTLDQSSEVLGSGKTLTIRVKEFGDAGQYTCHKGGEVLSHSLLLLHKKEDGIWSTDILKDQKEPKNKTFLRCEAKNYSGRFTCWWLTTISTDLTFSVKSSRGSSDPQGVTCGAATLSAERVRGDNKEYEYSVECQEDSASPAAEESLPIEVMVDAVHKLKYENYTSSFFIRDIIKPDPPKNLQLKPLKNSRQVEVSWEYPDTWSTPHSYFSLTFCVQVQGKSKREKKDRVFTDKTSATVICRKNASISVRAQDRCYSSSWSEWASVPCSRVESKYGPPCPPCPAPEFLGGPSVFLFPPKPKDTLMISRTPEVTCVVVDVSQEDPEVQFNWYVDGVEVHNAKTKPREEQFNSTYRVVSVLTVLHQDWLNGKEYKCKVSNKGLPSSIEKTISKAKGQPREPQVCTLPPSQEEMTENQVSLTCLVKGFYPSDIAVEWESNGQPENNYKTTPPVLDSDGSFFLYSWLTVDKSRWQEGNVFSCSVMHEALHNHYTQKSLSLSLG

SEQ ID NO: 72 - protein, 442 aa, Artificial Sequence
  Description of Artificial Sequence: Synthetic polypeptide
RNLPVATPDPGMFPCLHHSQNLLRAVSNMLQKARQTLEFYPCTSEEIDHVDITKDKTSTVEACLPLELTKNESSLNSRETSFITNGSCLASRKTSFMMALCLSSIYEDLKMYQVEFKTMNAKLLMDPKRQIFLDQNMLAVIDELMQALNFNSETVPQKSSLEEPDFYKTKIKLCILLHAFRIRACTIDRVMSYLNASGGGGSGGGGSGGGGSRVESKYGPPCPPCPAPEFLGGPSVFLFPPKPKDTLMISRTPEVTCVVVDVSQEDPEVQFNWYVDGVEVHNAKTKPREEQFNSTYRVVSVLTVLHQDWLNGKEYKCKVSNKGLPSSIEKTISKAKGQPREPRVYTLPPCQEEMTKNQVSLTCLVKGFYPSDIAVEWESNGQPENNYKTTPPVLVSDGSFTLYSRLTVDKSRWQEGNVFSCSVMHEALHNHYTQKSLSLSLG

SEQ ID NO: 73 - protein, 536 aa, Artificial Sequence
  Description of Artificial Sequence: Synthetic polypeptide
IWELKKDVYVVELDWYPDAPGEMVVLTCDTPEEDGITWTLDQSSEVLGSGKTLTIRVKEFGDAGQYTCHKGGEVLSHSLLLLHKKEDGIWSTDILKDQKEPKNKTFLRCEAKNYSGRFTCWWLTTISTDLTFSVKSSRGSSDPQGVTCGAATLSAERVRGDNKEYEYSVECQEDSASPAAEESLPIEVMVDAVHKLKYENYTSSFFIRDIIKPDPPKNLQLKPLKNSRQVEVSWEYPDTWSTPHSYFSLTFCVQVQGKSKREKKDRVFTDKTSATVICRKNASISVRAQDRCYSSSWSEWASVPCSRVESKYGPPCPPCPAPEFEGGPSVFLFPPKPKDTLMISRTPEVTCVVVDVSQEDPEVQFNWYVDGVEVHNAKTKPREEQFNSTYRVVSVLTVLHQDWLNGKEYKCKVSNKGLPSSIEKTISKAKGQPREPQVCTLPPSQEEMTENQVSLTCLVKGFYPSDIAVEWESNGQPENNYKTTPPVLDSDGSFFLYSWLTVDKSRWQEGNVFSCSVMHEALHNHYTQKSLSLSLG

SEQ ID NO: 74 - protein, 442 aa, Artificial Sequence
  Description of Artificial Sequence: Synthetic polypeptide
RNLPVATPDPGMFPCLHHSQNLLRAVSNMLQKARQTLEFYPCTSEEIDHVDITKDKTSTVEACLPLELTKNESSLNSRETSFITNGSCLASRKTSFMMALCLSSIYEDLKMYQVEFKTMNAKLLMDPKRQIFLDQNMLAVIDELMQALNFNSETVPQKSSLEEPDFYKTKIKLCILLHAFRIRACTIDRVMSYLNASGGGGSGGGGSGGGGSRVESKYGPPCPPCPAPEFEGGPSVFLFPPKPKDTLMISRTPEVTCVVVDVSQEDPEVQFNWYVDGVEVHNAKTKPREEQFNSTYRVVSVLTVLHQDWLNGKEYKCKVSNKGLPSSIEKTISKAKGQPREPRVYTLPPCQEEMTKNQVSLTCLVKGFYPSDIAVEWESNGQPENNYKTTPPVLVSDGSFTLYSRLTVDKSRWQEGNVFSCSVMHEALHNHYTQKSLSLSLG

SEQ ID NO: 75 - protein, 536 aa, Artificial Sequence
  Description of Artificial Sequence: Synthetic polypeptide
IWELKKDVYVVELDWYPDAPGEMVVLTCDTPEEDGITWTLDQSSEVLGSGKTLTIRVKEFGDAGQYTCHKGGEVLSHSLLLLHKKEDGIWSTDILKDQKEPKNKTFLRCEAKNYSGRFTCWWLTTISTDLTFSVKSSRGSSDPQGVTCGAATLSAERVRGDNKEYEYSVECQEDSASPAAEESLPIEVMVDAVHKLKYENYTSSFFIRDIIKPDPPKNLQLKPLKNSRQVEVSWEYPDTWSTPHSYFSLTFCVQVQGKSKREKKDRVFTDKTSATVICRKNASISVRAQDRCYSSSWSEWASVPCSRVESKYGPPCPPCPAPEFEGGPSVFLFPPKPKDTLMISRTPEVTCVVVDVSQEDPEVQFNWYVDGVEVHNAKTKPREEQFNSTYRVVSVLTVLHQDWLNGKEYKCKVSNKGLASSIEKTISKAKGQPREPQVCTLPPSQEEMTENQVSLTCLVKGFYPSDIAVEWESNGQPENNYKTTPPVLDSDGSFFLYSWLTVDKSRWQEGNVFSCSVMHEALHNHYTQKSLSLSLG

SEQ ID NO: 76 - protein, 442 aa, Artificial Sequence
  Description of Artificial Sequence: Synthetic polypeptide
RNLPVATPDPGMFPCLHHSQNLLRAVSNMLQKARQTLEFYPCTSEEIDHVDITKDKTSTVEACLPLELTKNESSLNSRETSFITNGSCLASRKTSFMMALCLSSIYEDLKMYQVEFKTMNAKLLMDPKRQIFLDQNMLAVIDELMQALNFNSETVPQKSSLEEPDFYKTKIKLCILLHAFRIRACTIDRVMSYLNASGGGGSGGGGSGGGGSRVESKYGPPCPPCPAPEFEGGPSVFLFPPKPKDTLMISRTPEVTCVVVDVSQEDPEVQFNWYVDGVEVHNAKTKPREEQFNSTYRVVSVLTVLHQDWLNGKEYKCKVSNKGLASSIEKTISKAKGQPREPRVYTLPPCQEEMTKNQVSLTCLVKGFYPSDIAVEWESNGQPENNYKTTPPVLVSDGSFTLYSRLTVDKSRWQEGNVFSCSVMHEALHNHYTQKSLSLSLG

SEQ ID NO: 77 - protein, 536 aa, Artificial Sequence
  Description of Artificial Sequence: Synthetic polypeptide
IWELKKDVYVVELDWYPDAPGEMVVLTCDTPEEDGITWTLDQSSEVLGSGKTLTIRVKEFGDAGQYTCHKGGEVLSHSLLLLHKKEDGIWSTDILKDQKEPKNKTFLRCEAKNYSGRFTCWWLTTISTDLTFSVKSSRGSSDPQGVTCGAATLSAERVRGDNKEYEYSVECQEDSASPAAEESLPIEVMVDAVHKLKYENYTSSFFIRDIIKPDPPKNLQLKPLKNSRQVEVSWEYPDTWSTPHSYFSLTFCVQVQGKSKREKKDRVFTDKTSATVICRKNASISVRAQDRCYSSSWSEWASVPCSRVESKYGPPCPPCPAPEFEGGPSVFLFPPKPKDTLMISRTPEVTCVVVDVSQEDPEVQFNWYVDGVEVHNAKTKPREEQFNSTYRVVSVLTVLHQDWLNGKEYKCKVSNKGLGSSIEKTISKAKGQPREPQVCTLPPSQEEMTENQVSLTCLVKGFYPSDIAVEWESNGQPENNYKTTPPVLDSDGSFFLYSWLTVDKSRWQEGNVFSCSVMHEALHNHYTQKSLSLSLG

SEQ ID NO: 78 - protein, 442 aa, Artificial Sequence
  Description of Artificial Sequence: Synthetic polypeptide
RNLPVATPDPGMFPCLHHSQNLLRAVSNMLQKARQTLEFYPCTSEEIDHVDITKDKTSTVEACLPLELTKNESSLNSRETSFITNGSCLASRKTSFMMALCLSSIYEDLKMYQVEFKTMNAKLLMDPKRQIFLDQNMLAVIDELMQALNFNSETVPQKSSLEEPDFYKTKIKLCILLHAFRIRACTIDRVMSYLNASGGGGSGGGGSGGGGSRVESKYGPPCPPCPAPEFEGGPSVFLFPPKPKDTLMISRTPEVTCVVVDVSQEDPEVQFNWYVDGVEVHNAKTKPREEQFNSTYRVVSVLTVLHQDWLNGKEYKCKVSNKGLGSSIEKTISKAKGQPREPRVYTLPPCQEEMTKNQVSLTCLVKGFYPSDIAVEWESNGQPENNYKTTPPVLVSDGSFTLYSRLTVDKSRWQEGNVFSCSVMHEALHNHYTQKSLSLSLG

SEQ ID NO: 79 - protein, 537 aa, Artificial Sequence
  Description of Artificial Sequence: Synthetic polypeptide
IWELKKDVYVVELDWYPDAPGEMVVLTCDTPEEDGITWTLDQSSEVLGSGKTLTIRVKEFGDAGQYTCHKGGEVLSHSLLLLHKKEDGIWSTDILKDQKEPKNKTFLRCEAKNYSGRFTCWWLTTISTDLTFSVKSSRGSSDPQGVTCGAATLSAERVRGDNKEYEYSVECQEDSASPAAEESLPIEVMVDAVHKLKYENYTSSFFIRDIIKPDPPKNLQLKPLKNSRQVEVSWEYPDTWSTPHSYFSLTFCVQVQGKSKREKKDRVFTDKTSATVICRKNASISVRAQDRCYSSSWSEWASVPCSEPKSSDKTHTCPPCPAPELLGGPSVFLFPPKPKDTLMISRTPEVTCVVVDVSHEDPEVKFNWYVDGVEVHNAKTKPREEQYNSTYRVVSVLTVLHQDWLNGKEYKCKVSNKALPAPIEKTISKAKGQPREPQVCTLPPSRDELTENQVSLTCLVKGFYPSDIAVEWESNGQPENNYKTTPPVLDSDGSFFLYSWLTVDKSRWQQGNVFSCSVMHEALHNHYTQKSLSLSPG

SEQ ID NO: 80 - protein, 443 aa, Artificial Sequence
  Description of Artificial Sequence: Synthetic polypeptide
RNLPVATPDPGMFPCLHHSQNLLRAVSNMLQKARQTLEFYPCTSEEIDHVDITKDKTSTVEACLPLELTKNESSLNSRETSFITNGSCLASRKTSFMMALCLSSIYEDLKMYQVEFKTMNAKLLMDPKRQIFLDQNMLAVIDELMQALNFNSETVPQKSSLEEPDFYKTKIKLCILLHAFRIRACTIDRVMSYLNASGGGGSGGGGSGGGGSEPKSSDKTHTCPPCPAPELLGGPSVFLFPPKPKDTLMISRTPEVTCVVVDVSHEDPEVKFNWYVDGVEVHNAKTKPREEQYNSTYRVVSVLTVLHQDWLNGKEYKCKVSNKALPAPIEKTISKAKGQPREPRVYTLPPCRDELTKNQVSLTCLVKGFYPSDIAVEWESNGQPENNYKTTPPVLVSDGSFTLYSKLTVDKSRWQQGNVFSCSVMHEALHNHYTQKSLSLSPG

SEQ ID NO: 81 - protein, 537 aa, Artificial Sequence
  Description of Artificial Sequence: Synthetic polypeptide
IWELKKDVYVVELDWYPDAPGEMVVLTCDTPEEDGITWTLDQSSEVLGSGKTLTIRVKEFGDAGQYTCHKGGEVLSHSLLLLHKKEDGIWSTDILKDQKEPKNKTFLRCEAKNYSGRFTCWWLTTISTDLTFSVKSSRGSSDPQGVTCGAATLSAERVRGDNKEYEYSVECQEDSASPAAEESLPIEVMVDAVHKLKYENYTSSFFIRDIIKPDPPKNLQLKPLKNSRQVEVSWEYPDTWSTPHSYFSLTFCVQVQGKSKREKKDRVFTDKTSATVICRKNASISVRAQDRCYSSSWSEWASVPCSEPKSSDKTHTCPPCPAPEAAGGPSVFLFPPKPKDTLMISRTPEVTCVVVDVSHEDPEVKFNWYVDGVEVHNAKTKPREEQYNSTYRVVSVLTVLHQDWLNGKEYKCKVSNKALPAPIEKTISKAKGQPREPQVCTLPPSRDELTENQVSLTCLVKGFYPSDIAVEWESNGQPENNYKTTPPVLDSDGSFFLYSWLTVDKSRWQQGNVFSCSVMHEALHNHYTQKSLSLSPG

SEQ ID NO: 82 - protein, 443 aa, Artificial Sequence
  Description of Artificial Sequence: Synthetic polypeptide
RNLPVATPDPGMFPCLHHSQNLLRAVSNMLQKARQTLEFYPCTSEEIDHVDITKDKTSTVEACLPLELTKNESSLNSRETSFITNGSCLASRKTSFMMALCLSSIYEDLKMYQVEFKTMNAKLLMDPKRQIFLDQNMLAVIDELMQALNFNSETVPQKSSLEEPDFYKTKIKLCILLHAFRIRACTIDRVMSYLNASGGGGSGGGGSGGGGSEPKSSDKTHTCPPCPAPEAAGGPSVFLFPPKPKDTLMISRTPEVTCVVVDVSHEDPEVKFNWYVDGVEVHNAKTKPREEQYNSTYRVVSVLTVLHQDWLNGKEYKCKVSNKALPAPIEKTISKAKGQPREPRVYTLPPCRDELTKNQVSLTCLVKGFYPSDIAVEWESNGQPENNYKTTPPVLVSDGSFTLYSKLTVDKSRWQQGNVFSCSVMHEALHNHYTQKSLSLSPG

SEQ ID NO: 83 - protein, 537 aa, Artificial Sequence
  Description of Artificial Sequence: Synthetic polypeptide
IWELKKDVYVVELDWYPDAPGEMVVLTCDTPEEDGITWTLDQSSEVLGSGKTLTIRVKEFGDAGQYTCHKGGEVLSHSLLLLHKKEDGIWSTDILKDQKEPKNKTFLRCEAKNYSGRFTCWWLTTISTDLTFSVKSSRGSSDPQGVTCGAATLSAERVRGDNKEYEYSVECQEDSASPAAEESLPIEVMVDAVHKLKYENYTSSFFIRDIIKPDPPKNLQLKPLKNSRQVEVSWEYPDTWSTPHSYFSLTFCVQVQGKSKREKKDRVFTDKTSATVICRKNASISVRAQDRCYSSSWSEWASVPCSEPKSSDKTHTCPPCPAPEAAGGPSVFLFPPKPKDTLMISRTPEVTCVVVDVSHEDPEVKFNWYVDGVEVHNAKTKPREEQYNSTYRVVSVLTVLHQDWLNGKEYKCKVSNKALAAPIEKTISKAKGQPREPQVCTLPPSRDELTENQVSLTCLVKGFYPSDIAVEWESNGQPENNYKTTPPVLDSDGSFFLYSWLTVDKSRWQQGNVFSCSVMHEALHNHYTQKSLSLSPG

SEQ ID NO: 84 - protein, 443 aa, Artificial Sequence
  Description of Artificial Sequence: Synthetic polypeptide
RNLPVATPDPGMFPCLHHSQNLLRAVSNMLQKARQTLEFYPCTSEEIDHVDITKDKTSTVEACLPLELTKNESSLNSRETSFITNGSCLASRKTSFMMALCLSSIYEDLKMYQVEFKTMNAKLLMDPKRQIFLDQNMLAVIDELMQALNFNSETVPQKSSLEEPDFYKTKIKLCILLHAFRIRACTIDRVMSYLNASGGGGSGGGGSGGGGSEPKSSDKTHTCPPCPAPEAAGGPSVFLFPPKPKDTLMISRTPEVTCVVVDVSHEDPEVKFNWYVDGVEVHNAKTKPREEQYNSTYRVVSVLTVLHQDWLNGKEYKCKVSNKALAAPIEKTISKAKGQPREPRVYTLPPCRDELTKNQVSLTCLVKGFYPSDIAVEWESNGQPENNYKTTPPVLVSDGSFTLYSKLTVDKSRWQQGNVFSCSVMHEALHNHYTQKSLSLSPG

SEQ ID NO: 85 - protein, 537 aa, Artificial Sequence
  Description of Artificial Sequence: Synthetic polypeptide
IWELKKDVYVVELDWYPDAPGEMVVLTCDTPEEDGITWTLDQSSEVLGSGKTLTIRVKEFGDAGQYTCHKGGEVLSHSLLLLHKKEDGIWSTDILKDQKEPKNKTFLRCEAKNYSGRFTCWWLTTISTDLTFSVKSSRGSSDPQGVTCGAATLSAERVRGDNKEYEYSVECQEDSASPAAEESLPIEVMVDAVHKLKYENYTSSFFIRDIIKPDPPKNLQLKPLKNSRQVEVSWEYPDTWSTPHSYFSLTFCVQVQGKSKREKKDRVFTDKTSATVICRKNASISVRAQDRCYSSSWSEWASVPCSEPKSSDKTHTCPPCPAPEAAGGPSVFLFPPKPKDTLMISRTPEVTCVVVDVSHEDPEVKFNWYVDGVEVHNAKTKPREEQYNSTYRVVSVLTVLHQDWLNGKEYKCKVSNKALGAPIEKTISKAKGQPREPQVCTLPPSRDELTENQVSLTCLVKGFYPSDIAVEWESNGQPENNYKTTPPVLDSDGSFFLYSWLTVDKSRWQQGNVFSCSVMHEALHNHYTQKSLSLSPG

SEQ ID NO: 86 - protein, 443 aa, Artificial Sequence
  Description of Artificial Sequence: Synthetic polypeptide
RNLPVATPDPGMFPCLHHSQNLLRAVSNMLQKARQTLEFYPCTSEEIDHVDITKDKTSTVEACLPLELTKNESSLNSRETSFITNGSCLASRKTSFMMALCLSSIYEDLKMYQVEFKTMNAKLLMDPKRQIFLDQNMLAVIDELMQALNFNSETVPQKSSLEEPDFYKTKIKLCILLHAFRIRACTIDRVMSYLNASGGGGSGGGGSGGGGSEPKSSDKTHTCPPCPAPEAAGGPSVFLFPPKPKDTLMISRTPEVTCVVVDVSHEDPEVKFNWYVDGVEVHNAKTKPREEQYNSTYRVVSVLTVLHQDWLNGKEYKCKVSNKALGAPIEKTISKAKGQPREPRVYTLPPCRDELTKNQVSLTCLVKGFYPSDIAVEWESNGQPENNYKTTPPVLVSDGSFTLYSKLTVDKSRWQQGNVFSCSVMHEALHNHYTQKSLSLSPG

SEQ ID NO: 87 - protein, 537 aa, Artificial Sequence
  Description of Artificial Sequence: Synthetic polypeptide
IWELKKDVYVVELDWYPDAPGEMVVLTCDTPEEDGITWTLDQSSEVLGSGKTLTIRVKEFGDAGQYTCHKGGEVLSHSLLLLHKKEDGIWSTDILKDQKEPKNKTFLRCEAKNYSGRFTCWWLTTISTDLTFSVKSSRGSSDPQGVTCGAATLSAERVRGDNKEYEYSVECQEDSASPAAEESLPIEVMVDAVHKLKYENYTSSFFIRDIIKPDPPKNLQLKPLKNSRQVEVSWEYPDTWSTPHSYFSLTFCVQVQGKSKREKKDRVFTDKTSATVICRKNASISVRAQDRCYSSSWSEWASVPCSEPKSSDKTHTCPPCPAPEAEGAPSVFLFPPKPKDTLMISRTPEVTCVVVDVSHEDPEVKFNWYVDGVEVHNAKTKPREEQYNSTYRVVSVLTVLHQDWLNGKEYKCKVSNKALPSSIEKTISKAKGQPREPQVCTLPPSRDELTENQVSLTCLVKGFYPSDIAVEWESNGQPENNYKTTPPVLDSDGSFFLYSWLTVDKSRWQQGNVFSCSVMHEALHNHYTQKSLSLSPG

SEQ ID NO: 88 - protein, 443 aa, Artificial Sequence
  Description of Artificial Sequence: Synthetic polypeptide
RNLPVATPDPGMFPCLHHSQNLLRAVSNMLQKARQTLEFYPCTSEEIDHVDITKDKTSTVEACLPLELTKNESSLNSRETSFITNGSCLASRKTSFMMALCLSSIYEDLKMYQVEFKTMNAKLLMDPKRQIFLDQNMLAVIDELMQALNFNSETVPQKSSLEEPDFYKTKIKLCILLHAFRIRACTIDRVMSYLNASGGGGSGGGGSGGGGSEPKSSDKTHTCPPCPAPEAEGAPSVFLFPPKPKDTLMISRTPEVTCVVVDVSHEDPEVKFNWYVDGVEVHNAKTKPREEQYNSTYRVVSVLTVLHQDWLNGKEYKCKVSNKALPSSIEKTISKAKGQPREPRVYTLPPCRDELTKNQVSLTCLVKGFYPSDIAVEWESNGQPENNYKTTPPVLVSDGSFTLYSKLTVDKSRWQQGNVFSCSVMHEALHNHYTQKSLSLSPG

SEQ ID NO: 89 - protein, 536 aa, Artificial Sequence
  Description of Artificial Sequence: Synthetic polypeptide
IWELKKDVYVVELDWYPDAPGEMVVLTCDTPEEDGITWTLDQSSEVLGSGKTLTIRVKEFGDAGQYTCHKGGEVLSHSLLLLHKKEDGIWSTDILKDQKEPKNKTFLRCEAKNYSGRFTCWWLTTISTDLTFSVKSSRGSSDPQGVTCGAATLSAERVRGDNKEYEYSVECQEDSACPAAEESLPIEVMVDAVHKLKYENYTSSFFIRDIIKPDPPKNLQLKPLKNSRQVEVSWEYPDTWSTPHSYFSLTFCVQVQGKSKREKKDRVFTDKTSATVICRKNASISVRAQDRCYSSSWSEWASVPCSRVESKYGPPCPPCPAPEFLGGPSVFLFPPKPKDTLMISRTPEVTCVVVDVSQEDPEVQFNWYVDGVEVHNAKTKPREEQFNSTYRVVSVLTVLHQDWLNGKEYKCKVSNKGLPSSIEKTISKAKGQPREPQVCTLPPSQEEMTENQVSLTCLVKGFYPSDIAVEWESNGQPENNYKTTPPVLDSDGSFFLYSWLTVDKSRWQEGNVFSCSVMHEALHNHYTQKSLSLSLG

SEQ ID NO: 90 - protein, 442 aa, Artificial Sequence
  Description of Artificial Sequence: Synthetic polypeptide
RNLPVATPDPGMFPCLHHSQNLLRAVSNMLQKARQTLEFYPCTSEEIDHVDITKDKTSTVEACLPLELTKNESCLNSRETSFITNGSCLASRKTSFMMALCLSSIYEDLKMYQVEFKTMNAKLLMDPKRQIFLDQNMLAVIDELMQALNFNSETVPQKSSLEEPDFYKTKIKLCILLHAFRIRACTIDRVMSYLNASGGGGSGGGGSGGGGSRVESKYGPPCPPCPAPEFLGGPSVFLFPPKPKDTLMISRTPEVTCVVVDVSQEDPEVQFNWYVDGVEVHNAKTKPREEQFNSTYRVVSVLTVLHQDWLNGKEYKCKVSNKGLPSSIEKTISKAKGQPREPRVYTLPPCQEEMTKNQVSLTCLVKGFYPSDIAVEWESNGQPENNYKTTPPVLVSDGSFTLYSRLTVDKSRWQEGNVFSCSVMHEALHNHYTQKSLSLSLG

SEQ ID NO: 91 - protein, 536 aa, Artificial Sequence
  Description of Artificial Sequence: Synthetic polypeptide
IWELKKDVYVVELDWYPDAPGEMVVLTCDTPEEDGITWTLDQSSEVLGSGKTLTIRVKEFGDAGQYTCHKGGEVLSHSLLLLHKKEDGIWSTDILKDQKEPKNKTFLRCEAKNYSGRFTCWWLTTISTDLTFSVKSSRGSSDPQGVTCGAATLSAERVRGDNKEYEYSVECQEDSACPAAEESLPIEVMVDAVHKLKYENYTSSFFIRDIIKPDPPKNLQLKPLKNSRQVEVSWEYPDTWSTPHSYFSLTFCVQVQGKSKREKKDRVFTDKTSATVICRKNASISVRAQDRCYSSSWSEWASVPCSRVESKYGPPCPPCPAPEFEGGPSVFLFPPKPKDTLMISRTPEVTCVVVDVSQEDPEVQFNWYVDGVEVHNAKTKPREEQFNSTYRVVSVLTVLHQDWLNGKEYKCKVSNKGLPSSIEKTISKAKGQPREPQVCTLPPSQEEMTENQVSLTCLVKGFYPSDIAVEWESNGQPENNYKTTPPVLDSDGSFFLYSWLTVDKSRWQEGNVFSCSVMHEALHNHYTQKSLSLSLG

SEQ ID NO: 92 - protein, 442 aa, Artificial Sequence
  Description of Artificial Sequence: Synthetic polypeptide
RNLPVATPDPGMFPCLHHSQNLLRAVSNMLQKARQTLEFYPCTSEEIDHVDITKDKTSTVEACLPLELTKNESCLNSRETSFITNGSCLASRKTSFMMALCLSSIYEDLKMYQVEFKTMNAKLLMDPKRQIFLDQNMLAVIDELMQALNFNSETVPQKSSLEEPDFYKTKIKLCILLHAFRIRACTIDRVMSYLNASGGGGSGGGGSGGGGSRVESKYGPPCPPCPAPEFEGGPSVFLFPPKPKDTLMISRTPEVTCVVVDVSQEDPEVQFNWYVDGVEVHNAKTKPREEQFNSTYRVVSVLTVLHQDWLNGKEYKCKVSNKGLPSSIEKTISKAKGQPREPRVYTLPPCQEEMTKNQVSLTCLVKGFYPSDIAVEWESNGQPENNYKTTPPVLVSDGSFTLYSRLTVDKSRWQEGNVFSCSVMHEALHNHYTQKSLSLSLG

SEQ ID NO: 93 - protein, 536 aa, Artificial Sequence
  Description of Artificial Sequence: Synthetic polypeptide
IWELKKDVYVVELDWYPDAPGEMVVLTCDTPEEDGITWTLDQSSEVLGSGKTLTIRVKEFGDAGQYTCHKGGEVLSHSLLLLHKKEDGIWSTDILKDQKEPKNKTFLRCEAKNYSGRFTCWWLTTISTDLTFSVKSSRGSSDPQGVTCGAATLSAERVRGDNKEYEYSVECQEDSACPAAEESLPIEVMVDAVHKLKYENYTSSFFIRDIIKPDPPKNLQLKPLKNSRQVEVSWEYPDTWSTPHSYFSLTFCVQVQGKSKREKKDRVFTDKTSATVICRKNASISVRAQDRCYSSSWSEWASVPCSRVESKYGPPCPPCPAPEFEGGPSVFLFPPKPKDTLMISRTPEVTCVVVDVSQEDPEVQFNWYVDGVEVHNAKTKPREEQFNSTYRVVSVLTVLHQDWLNGKEYKCKVSNKGLASSIEKTISKAKGQPREPQVCTLPPSQEEMTENQVSLTCLVKGFYPSDIAVEWESNGQPENNYKTTPPVLDSDGSFFLYSWLTVDKSRWQEGNVFSCSVMHEALHNHYTQKSLSLSLG

SEQ ID NO: 94 - protein, 442 aa, Artificial Sequence
  Description of Artificial Sequence: Synthetic polypeptide
RNLPVATPDPGMFPCLHHSQNLLRAVSNMLQKARQTLEFYPCTSEEIDHVDITKDKTSTVEACLPLELTKNESCLNSRETSFITNGSCLASRKTSFMMALCLSSIYEDLKMYQVEFKTMNAKLLMDPKRQIFLDQNMLAVIDELMQALNFNSETVPQKSSLEEPDFYKTKIKLCILLHAFRIRACTIDRVMSYLNASGGGGSGGGGSGGGGSRVESKYGPPCPPCPAPEFEGGPSVFLFPPKPKDTLMISRTPEVTCVVVDVSQEDPEVQFNWYVDGVEVHNAKTKPREEQFNSTYRVVSVLTVLHQDWLNGKEYKCKVSNKGLASSIEKTISKAKGQPREPRVYTLPPCQEEMTKNQVSLTCLVKGFYPSDIAVEWESNGQPENNYKTTPPVLVSDGSFTLYSRLTVDKSRWQEGNVFSCSVMHEALHNHYTQKSLSLSLG

SEQ ID NO: 95 - protein, 536 aa, Artificial Sequence
  Description of Artificial Sequence: Synthetic polypeptide
IWELKKDVYVVELDWYPDAPGEMVVLTCDTPEEDGITWTLDQSSEVLGSGKTLTIRVKEFGDAGQYTCHKGGEVLSHSLLLLHKKEDGIWSTDILKDQKEPKNKTFLRCEAKNYSGRFTCWWLTTISTDLTFSVKSSRGSSDPQGVTCGAATLSAERVRGDNKEYEYSVECQEDSACPAAEESLPIEVMVDAVHKLKYENYTSSFFIRDIIKPDPPKNLQLKPLKNSRQVEVSWEYPDTWSTPHSYFSLTFCVQVQGKSKREKKDRVFTDKTSATVICRKNASISVRAQDRCYSSSWSEWASVPCSRVESKYGPPCPPCPAPEFEGGPSVFLFPPKPKDTLMISRTPEVTCVVVDVSQEDPEVQFNWYVDGVEVHNAKTKPREEQFNSTYRVVSVLTVLHQDWLNGKEYKCKVSNKGLGSSIEKTISKAKGQPREPQVCTLPPSQEEMTENQVSLTCLVKGFYPSDIAVEWESNGQPENNYKTTPPVLDSDGSFFLYSWLTVDKSRWQEGNVFSCSVMHEALHNHYTQKSLSLSLG

SEQ ID NO: 96 - protein, 442 aa, Artificial Sequence
  Description of Artificial Sequence: Synthetic polypeptide
RNLPVATPDPGMFPCLHHSQNLLRAVSNMLQKARQTLEFYPCTSEEIDHVDITKDKTSTVEACLPLELTKNESCLNSRETSFITNGSCLASRKTSFMMALCLSSIYEDLKMYQVEFKTMNAKLLMDPKRQIFLDQNMLAVIDELMQALNFNSETVPQKSSLEEPDFYKTKIKLCILLHAFRIRACTIDRVMSYLNASGGGGSGGGGSGGGGSRVESKYGPPCPPCPAPEFEGGPSVFLFPPKPKDTLMISRTPEVTCVVVDVSQEDPEVQFNWYVDGVEVHNAKTKPREEQFNSTYRVVSVLTVLHQDWLNGKEYKCKVSNKGLGSSIEKTISKAKGQPREPRVYTLPPCQEEMTKNQVSLTCLVKGFYPSDIAVEWESNGQPENNYKTTPPVLVSDGSFTLYSRLTVDKSRWQEGNVFSCSVMHEALHNHYTQKSLSLSLG

SEQ ID NO: 97 - protein, 537 aa, Artificial Sequence
  Description of Artificial Sequence: Synthetic polypeptide
IWELKKDVYVVELDWYPDAPGEMVVLTCDTPEEDGITWTLDQSSEVLGSGKTLTIRVKEFGDAGQYTCHKGGEVLSHSLLLLHKKEDGIWSTDILKDQKEPKNKTFLRCEAKNYSGRFTCWWLTTISTDLTFSVKSSRGSSDPQGVTCGAATLSAERVRGDNKEYEYSVECQEDSACPAAEESLPIEVMVDAVHKLKYENYTSSFFIRDIIKPDPPKNLQLKPLKNSRQVEVSWEYPDTWSTPHSYFSLTFCVQVQGKSKREKKDRVFTDKTSATVICRKNASISVRAQDRCYSSSWSEWASVPCSEPKSSDKTHTCPPCPAPELLGGPSVFLFPPKPKDTLMISRTPEVTCVVVDVSHEDPEVKFNWYVDGVEVHNAKTKPREEQYNSTYRVVSVLTVLHQDWLNGKEYKCKVSNKALPAPIEKTISKAKGQPREPQVCTLPPSRDELTENQVSLTCLVKGFYPSDIAVEWESNGQPENNYKTTPPVLDSDGSFFLYSWLTVDKSRWQQGNVFSCSVMHEALHNHYTQKSLSLSPG

SEQ ID NO: 98 - protein, 443 aa, Artificial Sequence
  Description of Artificial Sequence: Synthetic polypeptide
RNLPVATPDPGMFPCLHHSQNLLRAVSNMLQKARQTLEFYPCTSEEIDHVDITKDKTSTVEACLPLELTKNESCLNSRETSFITNGSCLASRKTSFMMALCLSSIYEDLKMYQVEFKTMNAKLLMDPKRQIFLDQNMLAVIDELMQALNFNSETVPQKSSLEEPDFYKTKIKLCILLHAFRIRACTIDRVMSYLNASGGGGSGGGGSGGGGSEPKSSDKTHTCPPCPAPELLGGPSVFLFPPKPKDTLMISRTPEVTCVVVDVSHEDPEVKFNWYVDGVEVHNAKTKPREEQYNSTYRVVSVLTVLHQDWLNGKEYKCKVSNKALPAPIEKTISKAKGQPREPRVYTLPPCRDELTKNQVSLTCLVKGFYPSDIAVEWESNGQPENNYKTTPPVLVSDGSFTLYSKLTVDKSRWQQGNVFSCSVMHEALHNHYTQKSLSLSPG

SEQ ID NO: 99 - protein, 537 aa, Artificial Sequence; identical to SEQ ID NO: 57
  Description of Artificial Sequence: Synthetic polypeptide

SEQ ID NO: 100 - protein, 443 aa, Artificial Sequence; identical to SEQ ID NO: 58
  Description of Artificial Sequence: Synthetic polypeptide

SEQ ID NO: 101 - protein, 537 aa, Artificial Sequence; identical to SEQ ID NO: 59
  Description of Artificial Sequence: Synthetic polypeptide

SEQ ID NO: 102 - protein, 443 aa, Artificial Sequence; identical to SEQ ID NO: 60
  Description of Artificial Sequence: Synthetic polypeptide

SEQ ID NO: 103 - protein, 537 aa, Artificial Sequence
  Description of Artificial Sequence: Synthetic polypeptide
IWELKKDVYVVELDWYPDAPGEMVVLTCDTPEEDGITWTLDQSSEVLGSGKTLTIRVKEFGDAGQYTCHKGGEVLSHSLLLLHKKEDGIWSTDILKDQKEPKNKTFLRCEAKNYSGRFTCWWLTTISTDLTFSVKSSRGSSDPQGVTCGAATLSAERVRGDNKEYEYSVECQEDSACPAAEESLPIEVMVDAVHKLKYENYTSSFFIRDIIKPDPPKNLQLKPLKNSRQVEVSWEYPDTWSTPHSYFSLTFCVQVQGKSKREKKDRVFTDKTSATVICRKNASISVRAQDRCYSSSWSEWASVPCSEPKSSDKTHTCPPCPAPEAAGGPSVFLFPPKPKDTLMISRTPEVTCVVVDVSHEDPEVKFNWYVDGVEVHNAKTKPREEQYNSTYRVVSVLTVLHQDWLNGKEYKCKVSNKALGAPIEKTISKAKGQPREPQVCTLPPSRDELTENQVSLTCLVKGFYPSDIAVEWESNGQPENNYKTTPPVLDSDGSFFLYSWLTVDKSRWQQGNVFSCSVMHEALHNHYTQKSLSLSPG

SEQ ID NO: 104 - protein, 443 aa, Artificial Sequence
  Description of Artificial Sequence: Synthetic polypeptide
RNLPVATPDPGMFPCLHHSQNLLRAVSNMLQKARQTLEFYPCTSEEIDHVDITKDKTSTVEACLPLELTKNESCLNSRETSFITNGSCLASRKTSFMMALCLSSIYEDLKMYQVEFKTMNAKLLMDPKRQIFLDQNMLAVIDELMQALNFNSETVPQKSSLEEPDFYKTKIKLCILLHAFRIRACTIDRVMSYLNASGGGGSGGGGSGGGGSEPKSSDKTHTCPPCPAPEAAGGPSVFLFPPKPKDTLMISRTPEVTCVVVDVSHEDPEVKFNWYVDGVEVHNAKTKPREEQYNSTYRVVSVLTVLHQDWLNGKEYKCKVSNKALGAPIEKTISKAKGQPREPRVYTLPPCRDELTKNQVSLTCLVKGFYPSDIAVEWESNGQPENNYKTTPPVLVSDGSFTLYSKLTVDKSRWQQGNVFSCSVMHEALHNHYTQKSLSLSPG

SEQ ID NO: 105 - protein, 537 aa, Artificial Sequence; identical to SEQ ID NO: 61
  Description of Artificial Sequence: Synthetic polypeptide

SEQ ID NO: 106 - protein, 443 aa, Artificial Sequence; identical to SEQ ID NO: 62
  Description of Artificial Sequence: Synthetic polypeptide

SEQ ID NO: 107 - protein, 20 aa, Artificial Sequence
  Description of Artificial Sequence: Synthetic peptide
GGGGSGGGGSGGGGSGGGGS

SEQ ID NO: 108 - protein, 15 aa, Artificial Sequence
  Description of Artificial Sequence: Synthetic peptide
GGGGSGGGGSGGGGS

SEQ ID NO: 109 - protein, 10 aa, Artificial Sequence
  Description of Artificial Sequence: Synthetic peptide
GGGGSGGGGS

SEQ ID NO: 110 - protein, 5 aa, Artificial Sequence
  Description of Artificial Sequence: Synthetic peptide
GGGGS

SEQ ID NO: 111 - protein, 20 aa, Artificial Sequence
  Description of Artificial Sequence: Synthetic peptide
GSGSGSGSGSGSGSGSGSGS

SEQ ID NO: 112 - protein, 30 aa, Artificial Sequence
  Description of Artificial Sequence: Synthetic polypeptide
GGSGGSGGSGGSGGSGGSGGSGGSGGSGGS

SEQ ID NO: 113 - protein, 40 aa, Artificial Sequence
  Description of Artificial Sequence: Synthetic polypeptide
GGGSGGGSGGGSGGGSGGGSGGGSGGGSGGGSGGGSGGGS

SEQ ID NO: 114 - protein, 40 aa, Artificial Sequence
  Description of Artificial Sequence: Synthetic polypeptide
GGSGGGSGGGSGGGSGGGSGGGSGGGSGGGSGGGSGGGSG

SEQ ID NO: 115 - protein, 50 aa, Artificial Sequence
  Description of Artificial Sequence: Synthetic polypeptide
GGSGGGGSGGGGSGGGGSGGGGSGGGGSGGGGSGGGGSGGGGSGGGGSGG

SEQ ID NO: 116 - protein, 50 aa, Artificial Sequence
  Description of Artificial Sequence: Synthetic polypeptide
GGGGSGGGGSGGGGSGGGGSGGGGSGGGGSGGGGSGGGGSGGGGSGGGGS

SEQ ID NO: 117 - protein, 20 aa, Artificial Sequence
  Description of Artificial Sequence: Synthetic peptide
GGGGSGGGGSGGGGSGGGGS

SEQ ID NO: 118 - protein, 15 aa, Artificial Sequence
  Description of Artificial Sequence: Synthetic peptide
GGGGSGGGGSGGGGS

SEQ ID NO: 119 - protein, 100 aa, Artificial Sequence
  Description of Artificial Sequence: Synthetic polypeptide
GGGGSGGGGSGGGGSGGGGSGGGGSGGGGSGGGGSGGGGSGGGGSGGGGSGGGGSGGGGSGGGGSGGGGSGGGGSGGGGSGGGGSGGGGSGGGGSGGGGS

SEQ ID NO: 120 - protein, 100 aa, Artificial Sequence
  Description of Artificial Sequence: Synthetic polypeptide
GGSGGGGSGGGGSGGGGSGGGGSGGGGSGGGGSGGGGSGGGGSGGGGSGGGGSGGGGSGGGGSGGGGSGGGGSGGGGSGGGGSGGGGSGGGGSGGGGSGG

SEQ ID NO: 121 - protein, 306 aa, Artificial Sequence
  Description of Artificial Sequence: Synthetic polypeptide
IWELKKDVYVVELDWYPDAPGEMVVLTCDTPEEDGITWTLDQSSEVLGSGKTLTIRVKEFGDAGQYTCHKGGEVLSHSLLLLHKKEDGIWSTDILKDQKEPKNKTFLRCEAKNYSGRFTCWWLTTISTDLTFSVKSSRGSSDPQGVTCGAATLSAERVRGDNKEYEYSVECQEDSACPAAEESLPIEVMVDAVHKLKYENYTSSFFIRDIIKPDPPKNLQLKPLKNSRQVEVSWEYPDTWSTPHSYFSLTFCVQVQGKSKREKKDRVFTDKTSATVICRKNASISVRAQDRYYSSSWSEWASVPCS

SEQ ID NO: 122 - protein, 197 aa, Artificial Sequence
  Description of Artificial Sequence: Synthetic polypeptide
RNLPVATPDPGMFPCLHHSQNLLRAVSNMLQKARQTLEFYPCTSEEIDHVDITKDKTSTVEACLPLELTKNESCLNSRETSFITNGSCLASRKTSFMMALCLSSIYEDLKMYQVEFKTMNAKLLMDPKRQIFLDQNMLAVIDELMQALNFNSETVPQKSSLEEPDFYKTKIKLCILLHAFRIRAVTIDRVMSYLNAS

SEQ ID NO: 123 - protein, 306 aa, Artificial Sequence
  Description of Artificial Sequence: Synthetic polypeptide
IWELKKDVYVVELDWYPDAPGEMVVLTCDTPEEDGITWTLDQSSEVLGSGKTLTIRVKEFGDAGQYTCHKGGEVLSHSLLLLHKKEDGIWSTDILKDQKEPKNKTFLRCEAKNYSGRFTCWWLTTISTDLTFSVKSSRGSSDPQGVTCGAATLSAERVRGDNKEYEYSVECQEDSASPAAEESLPIEVMVDAVHKLKYENYTSSFFIRDIIKPDPPKNLQLKPLKNSRQVEVSWEYPDTWSTPHSYFSLTFCVQVQGKSKREKKDRVFTDKTSATVICRKNASISVRAQDRCYSSSWSEWASVPCS

SEQ ID NO: 124 - protein, 197 aa, Artificial Sequence
  Description of Artificial Sequence: Synthetic polypeptide
RNLPVATPDPGMFPCLHHSQNLLRAVSNMLQKARQTLEFYPCTSEEIDHVDITKDKTSTVEACLPLELTKNESSLNSRETSFITNGSCLASRKTSFMMALCLSSIYEDLKMYQVEFKTMNAKLLMDPKRQIFLDQNMLAVIDELMQALNFNSETVPQKSSLEEPDFYKTKIKLCILLHAFRIRACTIDRVMSYLNAS

SEQ ID NO: 125 - protein, 306 aa, Artificial Sequence
  Description of Artificial Sequence: Synthetic polypeptide
IWELKKDVYVVELDWYPDAPGEMVVLTCDTPEEDGITWTLDQSSEVLGSGKTLTIRVKEFGDAGQYTCHKGGEVLSHSLLLLHKKEDGIWSTDILKDQKEPKNKTFLRCEAKNYSGRFTCWWLTTISTDLTFSVKSSRGSSDPQGVTCGAATLSAERVRGDNKEYEYSVECQEDSACPAAEESLPIEVMVDAVHKLKYENYTSSFFIRDIIKPDPPKNLQLKPLKNSRQVEVSWEYPDTWSTPHSYFSLTFCVQVQGKSKREKKDRVFTDKTSATVICRKNASISVRAQDRCYSSSWSEWASVPCS

SEQ ID NO: 126 - protein, 197 aa, Artificial Sequence
  Description of Artificial Sequence: Synthetic polypeptide
RNLPVATPDPGMFPCLHHSQNLLRAVSNMLQKARQTLEFYPCTSEEIDHVDITKDKTSTVEACLPLELTKNESCLNSRETSFITNGSCLASRKTSFMMALCLSSIYEDLKMYQVEFKTMNAKLLMDPKRQIFLDQNMLAVIDELMQALNFNSETVPQKSSLEEPDFYKTKIKLCILLHAFRIRACTIDRVMSYLNAS

SEQ ID NO: 127 - protein, 306 aa, Homo sapiens
IWELKKDVYVVELDWYPDAPGEMVVLTCDTPEEDGITWTLDQSSEVLGSGKTLTIQVKEFGDAGQYTCHKGGEVLSHSLLLLHKKEDGIWSTDILKDQKEPKNKTFLRCEAKNYSGRFTCWWLTTISTDLTFSVKSSRGSSDPQGVTCGAATLSAERVRGDNKEYEYSVECQEDSACPAAEESLPIEVMVDAVHKLKYENYTSSFFIRDIIKPDPPKNLQLKPLKNSRQVEVSWEYPDTWSTPHSYFSLTFCVQVQGKSKREKKDRVFTDKTSATVICRKNASISVRAQDRYYSSSWSEWASVPCS

SEQ ID NO: 128 - protein, 197 aa, Homo sapiens
RNLPVATPDPGMFPCLHHSQNLLRAVSNMLQKARQTLEFYPCTSEEIDHEDITKDKTSTVEACLPLELTKNESCLNSRETSFITNGSCLASRKTSFMMALCLSSIYEDLKMYQVEFKTMNAKLLMDPKRQIFLDQNMLAVIDELMQALNFNSETVPQKSSLEEPDFYKTKIKLCILLHAFRIRAVTIDRVMSYLNAS

SEQ ID NO: 129 - protein, 536 aa, Artificial Sequence
  Description of Artificial Sequence: Synthetic polypeptide
IWELKKDVYVVELDWYPDAPGEMVVLTCDTPEEDGITWTLDQSSEVLGSGKTLTIQVKEFGDAGQYTCHKGGEVLSHSLLLLHKKEDGIWSTDILKDQKEPKNKTFLRCEAKNYSGRFTCWWLTTISTDLTFSVKSSRGSSDPQGVTCGAATLSAERVRGDNKEYEYSVECQEDSACPAAEESLPIEVMVDAVHKLKYENYTSSFFIRDIIKPDPPKNLQLKPLKNSRQVEVSWEYPDTWSTPHSYFSLTFCVQVQGKSKREKKDRVFTDKTSATVICRKNASISVRAQDRYYSSSWSEWASVPCSRVESKYGPPCPPCPAPEFLGGPSVFLFPPKPKDTLMISRTPEVTCVVVDVSQEDPEVQFNWYVDGVEVHNAKTKPREEQFNSTYRVVSVLTVLHQDWLNGKEYKCKVSNKGLPSSIEKTISKAKGQPREPQVCTLPPSQEEMTKNQVSLTCLVEGFYPSDIAVEWESNGQPENNYKTTPPVLDSDGSFFLYSWLTVDKSRWQEGNVFSCSVMHEALHNHYTQKSLSLSLG

SEQ ID NO: 130 - protein, 442 aa, Artificial Sequence
  Description of Artificial Sequence: Synthetic polypeptide
RNLPVATPDPGMFPCLHHSQNLLRAVSNMLQKARQTLEFYPCTSEEIDHEDITKDKTSTVEACLPLELTKNESCLNSRETSFITNGSCLASRKTSFMMALCLSSIYEDLKMYQVEFKTMNAKLLMDPKRQIFLDQNMLAVIDELMQALNFNSETVPQKSSLEEPDFYKTKIKLCILLHAFRIRAVTIDRVMSYLNASGGGGSGGGGSGGGGSRVESKYGPPCPPCPAPEFLGGPSVFLFPPKPKDTLMISRTPEVTCVVVDVSQEDPEVQFNWYVDGVEVHNAKTKPREEQFNSTYRVVSVLTVLHQDWLNGKEYKCKVSNKGLPSSIEKTISKAKGQPREPQVYTLPPCQENMTKNQVSLTCLVKGFYPSDIAVEWESNGQPENNYKTTPPVLVSDGSFTLYSRLTVDKSRWQEGNVFSCSVMHEALHNHYTQKSLSLSLG

SEQ ID NO: 131 - protein, 536 aa, Artificial Sequence
  Description of Artificial Sequence: Synthetic polypeptide
IWELKKDVYVVELDWYPDAPGEMVVLTCDTPEEDGITWTLDQSSEVLGSGKTLTIQVKEFGDAGQYTCHKGGEVLSHSLLLLHKKEDGIWSTDILKDQKEPKNKTFLRCEAKNYSGRFTCWWLTTISTDLTFSVKSSRGSSDPQGVTCGAATLSAERVRGDNKEYEYSVECQEDSACPAAEESLPIEVMVDAVHKLKYENYTSSFFIRDIIKPDPPKNLQLKPLKNSRQVEVSWEYPDTWSTPHSYFSLTFCVQVQGKSKREKKDRVFTDKTSATVICRKNASISVRAQDRYYSSSWSEWASVPCSRVESKYGPPCPPCPAPEFLGGPSVFLFPPKPKDTLMISRTPEVTCVVVDVSQEDPEVQFNWYVDGVEVHNAKTKPREEQFNSTYRVVSVLTVLHQDWLNGKEYKCKVSNKGLPSSIEKTISKAKGQPREPQVCTLPPSQEEMTENQVSLTCLVKGFYPSDIAVEWESNGQPENNYKTTPPVLDSDGSFFLYSWLTVDKSRWQEGNVFSCSVMHEALHNHYTQKSLSLSLG

SEQ ID NO: 132 - protein, 442 aa, Artificial Sequence
  Description of Artificial Sequence: Synthetic polypeptide
RNLPVATPDPGMFPCLHHSQNLLRAVSNMLQKARQTLEFYPCTSEEIDHEDITKDKTSTVEACLPLELTKNESCLNSRETSFITNGSCLASRKTSFMMALCLSSIYEDLKMYQVEFKTMNAKLLMDPKRQIFLDQNMLAVIDELMQALNFNSETVPQKSSLEEPDFYKTKIKLCILLHAFRIRAVTIDRVMSYLNASGGGGSGGGGSGGGGSRVESKYGPPCPPCPAPEFLGGPSVFLFPPKPKDTLMISRTPEVTCVVVDVSQEDPEVQFNWYVDGVEVHNAKTKPREEQFNSTYRVVSVLTVLHQDWLNGKEYKCKVSNKGLPSSIEKTISKAKGQPREPRVYTLPPCQEEMTKNQVSLTCLVKGFYPSDIAVEWESNGQPENNYKTTPPVLVSDGSFTLYSRLTVDKSRWQEGNVFSCSVMHEALHNHYTQKSLSLSLG

SEQ ID NO: 133 - protein, 536 aa, Artificial Sequence
  Description of Artificial Sequence: Synthetic polypeptide
IWELKKDVYVVELDWYPDAPGEMVVLTCDTPEEDGITWTLDQSSEVLGSGKTLTIQVKEFGDAGQYTCHKGGEVLSHSLLLLHKKEDGIWSTDILKDQKEPKNKTFLRCEAKNYSGRFTCWWLTTISTDLTFSVKSSRGSSDPQGVTCGAATLSAERVRGDNKEYEYSVECQEDSACPAAEESLPIEVMVDAVHKLKYENYTSSFFIRDIIKPDPPKNLQLKPLKNSRQVEVSWEYPDTWSTPHSYFSLTFCVQVQGKSKREKKDRVFTDKTSATVICRKNASISVRAQDRYYSSSWSEWASVPCSRVESKYGPPCPPCPAPEFEGGPSVFLFPPKPKDTLMISRTPEVTCVVVDVSQEDPEVQFNWYVDGVEVHNAKTKPREEQFNSTYRVVSVLTVLHQDWLNGKEYKCKVSNKGLPSSIEKTISKAKGQPREPQVCTLPPSQEEMTENQVSLTCLVKGFYPSDIAVEWESNGQPENNYKTTPPVLDSDGSFFLYSWLTVDKSRWQEGNVFSCSVMHEALHNHYTQKSLSLSLG

SEQ ID NO: 134 - protein, 442 aa, Artificial Sequence
  Description of Artificial Sequence: Synthetic polypeptide
RNLPVATPDPGMFPCLHHSQNLLRAVSNMLQKARQTLEFYPCTSEEIDHEDITKDKTSTVEACLPLELTKNESCLNSRETSFITNGSCLASRKTSFMMALCLSSIYEDLKMYQVEFKTMNAKLLMDPKRQIFLDQNMLAVIDELMQALNFNSETVPQKSSLEEPDFYKTKIKLCILLHAFRIRAVTIDRVMSYLNASGGGGSGGGGSGGGGSRVESKYGPPCPPCPAPEFEGGPSVFLFPPKPKDTLMISRTPEVTCVVVDVSQEDPEVQFNWYVDGVEVHNAKTKPREEQFNSTYRVVSVLTVLHQDWLNGKEYKCKVSNKGLPSSIEKTISKAKGQPREPRVYTLPPCQEEMTKNQVSLTCLVKGFYPSDIAVEWESNGQPENNYKTTPPVLVSDGSFTLYSRLTVDKSRWQEGNVFSCSVMHEALHNHYTQKSLSLSLG

SEQ ID NO: 135 - protein, 536 aa, Artificial Sequence
  Description of Artificial Sequence: Synthetic polypeptide
IWELKKDVYVVELDWYPDAPGEMVVLTCDTPEEDGITWTLDQSSEVLGSGKTLTIQVKEFGDAGQYTCHKGGEVLSHSLLLLHKKEDGIWSTDILKDQKEPKNKTFLRCEAKNYSGRFTCWWLTTISTDLTFSVKSSRGSSDPQGVTCGAATLSAERVRGDNKEYEYSVECQEDSACPAAEESLPIEVMVDAVHKLKYENYTSSFFIRDIIKPDPPKNLQLKPLKNSRQVEVSWEYPDTWSTPHSYFSLTFCVQVQGKSKREKKDRVFTDKTSATVICRKNASISVRAQDRYYSSSWSEWASVPCSRVESKYGPPCPPCPAPEFEGGPSVFLFPPKPKDTLMISRTPEVTCVVVDVSQEDPEVQFNWYVDGVEVHNAKTKPREEQFNSTYRVVSVLTVLHQDWLNGKEYKCKVSNKGLASSIEKTISKAKGQPREPQVCTLPPSQEEMTENQVSLTCLVKGFYPSDIAVEWESNGQPENNYKTTPPVLDSDGSFFLYSWLTVDKSRWQEGNVFSCSVMHEALHNHYTQKSLSLSLG

SEQ ID NO: 136 - protein, 442 aa, Artificial Sequence
  Description of Artificial Sequence: Synthetic polypeptide
RNLPVATPDPGMFPCLHHSQNLLRAVSNMLQKARQTLEFYPCTSEEIDHEDITKDKTSTVEACLPLELTKNESCLNSRETSFITNGSCLASRKTSFMMALCLSSIYEDLKMYQVEFKTMNAKLLMDPKRQIFLDQNMLAVIDELMQALNFNSETVPQKSSLEEPDFYKTKIKLCILLHAFRIRAVTIDRVMSYLNASGGGGSGGGGSGGGGSRVESKYGPPCPPCPAPEFEGGPSVFLFPPKPKDTLMISRTPEVTCVVVDVSQEDPEVQFNWYVDGVEVHNAKTKPREEQFNSTYRVVSVLTVLHQDWLNGKEYKCKVSNKGLASSIEKTISKAKGQPREPRVYTLPPCQEEMTKNQVSLTCLVKGFYPSDIAVEWESNGQPENNYKTTPPVLVSDGSFTLYSRLTVDKSRWQEGNVFSCSVMHEALHNHYTQKSLSLSLG

SEQ ID NO: 137 - protein, 537 aa, Artificial Sequence
  Description of Artificial Sequence: Synthetic polypeptide
IWELKKDVYVVELDWYPDAPGEMVVLTCDTPEEDGITWTLDQSSEVLGSGKTLTIQVKEFGDAGQYTCHKGGEVLSHSLLLLHKKEDGIWSTDILKDQKEPKNKTFLRCEAKNYSGRFTCWWLTTISTDLTFSVKSSRGSSDPQGVTCGAATLSAERVRGDNKEYEYSVECQEDSACPAAEESLPIEVMVDAVHKLKYENYTSSFFIRDIIKPDPPKNLQLKPLKNSRQVEVSWEYPDTWSTPHSYFSLTFCVQVQGKSKREKKDRVFTDKTSATVICRKNASISVRAQDRYYSSSWSEWASVPCSEPKSSDKTHTCPPCPAPELLGGPSVFLFPPKPKDTLMISRTPEVTCVVVDVSHEDPEVKFNWYVDGVEVHNAKTKPREEQYNSTYRVVSVLTVLHQDWLNGKEYKCKVSNKALPAPIEKTISKAKGQPREPQVCTLPPSRDELTENQVSLTCLVKGFYPSDIAVEWESNGQPENNYKTTPPVLDSDGSFFLYSWLTVDKSRWQQGNVFSCSVMHEALHNHYTQKSLSLSPG

SEQ ID NO: 138 - protein, 443 aa, Artificial Sequence
  Description of Artificial Sequence: Synthetic polypeptide
RNLPVATPDPGMFPCLHHSQNLLRAVSNMLQKARQTLEFYPCTSEEIDHEDITKDKTSTVEACLPLELTKNESCLNSRETSFITNGSCLASRKTSFMMALCLSSIYEDLKMYQVEFKTMNAKLLMDPKRQIFLDQNMLAVIDELMQALNFNSETVPQKSSLEEPDFYKTKIKLCILLHAFRIRAVTIDRVMSYLNASGGGGSGGGGSGGGGSEPKSSDKTHTCPPCPAPELLGGPSVFLFPPKPKDTLMISRTPEVTCVVVDVSHEDPEVKFNWYVDGVEVHNAKTKPREEQYNSTYRVVSVLTVLHQDWLNGKEYKCKVSNKALPAPIEKTISKAKGQPREPRVYTLPPCRDELTKNQVSLTCLVKGFYPSDIAVEWESNGQPENNYKTTPPVLVSDGSFTLYSKLTVDKSRWQQGNVFSCSVMHEALHNHYTQKSLSLSPG

SEQ ID NO: 139 - protein, 537 aa, Artificial Sequence
  Description of Artificial Sequence: Synthetic polypeptide
IWELKKDVYVVELDWYPDAPGEMVVLTCDTPEEDGITWTLDQSSEVLGSGKTLTIQVKEFGDAGQYTCHKGGEVLSHSLLLLHKKEDGIWSTDILKDQKEPKNKTFLRCEAKNYSGRFTCWWLTTISTDLTFSVKSSRGSSDPQGVTCGAATLSAERVRGDNKEYEYSVECQEDSACPAAEESLPIEVMVDAVHKLKYENYTSSFFIRDIIKPDPPKNLQLKPLKNSRQVEVSWEYPDTWSTPHSYFSLTFCVQVQGKSKREKKDRVFTDKTSATVICRKNASISVRAQDRYYSSSWSEWASVPCSEPKSSDKTHTCPPCPAPEAAGGPSVFLFPPKPKDTLMISRTPEVTCVVVDVSHEDPEVKFNWYVDGVEVHNAKTKPREEQYNSTYRVVSVLTVLHQDWLNGKEYKCKVSNKALPAPIEKTISKAKGQPREPQVCTLPPSRDELTENQVSLTCLVKGFYPSDIAVEWESNGQPENNYKTTPPVLDSDGSFFLYSWLTVDKSRWQQGNVFSCSVMHEALHNHYTQKSLSLSPG

SEQ ID NO: 140 - protein, 443 aa, Artificial Sequence
  Description of Artificial Sequence: Synthetic polypeptide
RNLPVATPDPGMFPCLHHSQNLLRAVSNMLQKARQTLEFYPCTSEEIDHEDITKDKTSTVEACLPLELTKNESCLNSRETSFITNGSCLASRKTSFMMALCLSSIYEDLKMYQVEFKTMNAKLLMDPKRQIFLDQNMLAVIDELMQALNFNSETVPQKSSLEEPDFYKTKIKLCILLHAFRIRAVTIDRVMSYLNASGGGGSGGGGSGGGGSEPKSSDKTHTCPPCPAPEAAGGPSVFLFPPKPKDTLMISRTPEVTCVVVDVSHEDPEVKFNWYVDGVEVHNAKTKPREEQYNSTYRVVSVLTVLHQDWLNGKEYKCKVSNKALPAPIEKTISKAKGQPREPRVYTLPPCRDELTKNQVSLTCLVKGFYPSDIAVEWESNGQPENNYKTTPPVLVSDGSFTLYSKLTVDKSRWQQGNVFSCSVMHEALHNHYTQKSLSLSPG

SEQ ID NO: 141 - protein, 537 aa, Artificial Sequence
  Description of Artificial Sequence: Synthetic polypeptide
IWELKKDVYVVELDWYPDAPGEMVVLTCDTPEEDGITWTLDQSSEVLGSGKTLTIQVKEFGDAGQYTCHKGGEVLSHSLLLLHKKEDGIWSTDILKDQKEPKNKTFLRCEAKNYSGRFTCWWLTTISTDLTFSVKSSRGSSDPQGVTCGAATLSAERVRGDNKEYEYSVECQEDSACPAAEESLPIEVMVDAVHKLKYENYTSSFFIRDIIKPDPPKNLQLKPLKNSRQVEVSWEYPDTWSTPHSYFSLTFCVQVQGKSKREKKDRVFTDKTSATVICRKNASISVRAQDRYYSSSWSEWASVPCSEPKSSDKTHTCPPCPAPEAAGGPSVFLFPPKPKDTLMISRTPEVTCVVVDVSHEDPEVKFNWYVDGVEVHNAKTKPREEQYNSTYRVVSVLTVLHQDWLNGKEYKCKVSNKALAAPIEKTISKAKGQPREPQVCTLPPSRDELTENQVSLTCLVKGFYPSDIAVEWESNGQPENNYKTTPPVLDSDGSFFLYSWLTVDKSRWQQGNVFSCSVMHEALHNHYTQKSLSLSPG

SEQ ID NO: 142 - protein, 443 aa, Artificial Sequence
  Description of Artificial Sequence: Synthetic polypeptide
RNLPVATPDPGMFPCLHHSQNLLRAVSNMLQKARQTLEFYPCTSEEIDHEDITKDKTSTVEACLPLELTKNESCLNSRETSFITNGSCLASRKTSFMMALCLSSIYEDLKMYQVEFKTMNAKLLMDPKRQIFLDQNMLAVIDELMQALNFNSETVPQKSSLEEPDFYKTKIKLCILLHAFRIRAVTIDRVMSYLNASGGGGSGGGGSGGGGSEPKSSDKTHTCPPCPAPEAAGGPSVFLFPPKPKDTLMISRTPEVTCVVVDVSHEDPEVKFNWYVDGVEVHNAKTKPREEQYNSTYRVVSVLTVLHQDWLNGKEYKCKVSNKALAAPIEKTISKAKGQPREPRVYTLPPCRDELTKNQVSLTCLVKGFYPSDIAVEWESNGQPENNYKTTPPVLVSDGSFTLYSKLTVDKSRWQQGNVFSCSVMHEALHNHYTQKSLSLSPG

SEQ ID NO: 143 - protein, 537 aa, Artificial Sequence
  Description of Artificial Sequence: Synthetic polypeptide
IWELKKDVYVVELDWYPDAPGEMVVLTCDTPEEDGITWTLDQSSEVLGSGKTLTIQVKEFGDAGQYTCHKGGEVLSHSLLLLHKKEDGIWSTDILKDQKEPKNKTFLRCEAKNYSGRFTCWWLTTISTDLTFSVKSSRGSSDPQGVTCGAATLSAERVRGDNKEYEYSVECQEDSACPAAEESLPIEVMVDAVHKLKYENYTSSFFIRDIIKPDPPKNLQLKPLKNSRQVEVSWEYPDTWSTPHSYFSLTFCVQVQGKSKREKKDRVFTDKTSATVICRKNASISVRAQDRYYSSSWSEWASVPCSEPKSSDKTHTCPPCPAPEAEGAPSVFLFPPKPKDTLMISRTPEVTCVVVDVSHEDPEVKFNWYVDGVEVHNAKTKPREEQYNSTYRVVSVLTVLHQDWLNGKEYKCKVSNKALPSSIEKTISKAKGQPREPQVCTLPPSRDELTENQVSLTCLVKGFYPSDIAVEWESNGQPENNYKTTPPVLDSDGSFFLYSWLTVDKSRWQQGNVFSCSVMHEALHNHYTQKSLSLSPG

SEQ ID NO: 144 - protein, 443 aa, Artificial Sequence
  Description of Artificial Sequence: Synthetic polypeptide
RNLPVATPDPGMFPCLHHSQNLLRAVSNMLQKARQTLEFYPCTSEEIDHEDITKDKTSTVEACLPLELTKNESCLNSRETSFITNGSCLASRKTSFMMALCLSSIYEDLKMYQVEFKTMNAKLLMDPKRQIFLDQNMLAVIDELMQALNFNSETVPQKSSLEEPDFYKTKIKLCILLHAFRIRAVTIDRVMSYLNASGGGGSGGGGSGGGGSEPKSSDKTHTCPPCPAPEAEGAPSVFLFPPKPKDTLMISRTPEVTCVVVDVSHEDPEVKFNWYVDGVEVHNAKTKPREEQYNSTYRVVSVLTVLHQDWLNGKEYKCKVSNKALPSSIEKTISKAKGQPREPRVYTLPPCRDELTKNQVSLTCLVKGFYPSDIAVEWESNGQPENNYKTTPPVLVSDGSFTLYSKLTVDKSRWQQGNVFSCSVMHEALHNHYTQKSLSLSPG

SEQ ID NO: 145 - protein, 536 aa, Artificial Sequence; identical to SEQ ID NO: 129
  Description of Artificial Sequence: Synthetic polypeptide

SEQ ID NO: 146 - protein, 427 aa, Artificial Sequence
  Description of Artificial Sequence: Synthetic polypeptide
RNLPVATPDPGMFPCLHHSQNLLRAVSNMLQKARQTLEFYPCTSEEIDHEDITKDKTSTVEACLPLELTKNESCLNSRETSFITNGSCLASRKTSFMMALCLSSIYEDLKMYQVEFKTMNAKLLMDPKRQIFLDQNMLAVIDELMQALNFNSETVPQKSSLEEPDFYKTKIKLCILLHAFRIRAVTIDRVMSYLNASRVESKYGPPCPPCPAPEFLGGPSVFLFPPKPKDTLMISRTPEVTCVVVDVSQEDPEVQFNWYVDGVEVHNAKTKPREEQFNSTYRVVSVLTVLHQDWLNGKEYKCKVSNKGLPSSIEKTISKAKGQPREPQVYTLPPCQENMTKNQVSLTCLVKGFYPSDIAVEWESNGQPENNYKTTPPVLVSDGSFTLYSRLTVDKSRWQEGNVFSCSVMHEALHNHYTQKSLSLSLG

SEQ ID NO: 147 - protein, 536 aa, Artificial Sequence; identical to SEQ ID NO: 129
  Description of Artificial Sequence: Synthetic polypeptide

SEQ ID NO: 148 - protein, 432 aa, Artificial Sequence
  Description of Artificial Sequence: Synthetic polypeptide
RNLPVATPDPGMFPCLHHSQNLLRAVSNMLQKARQTLEFYPCTSEEIDHEDITKDKTSTVEACLPLELTKNESCLNSRETSFITNGSCLASRKTSFMMALCLSSIYEDLKMYQVEFKTMNAKLLMDPKRQIFLDQNMLAVIDELMQALNFNSETVPQKSSLEEPDFYKTKIKLCILLHAFRIRAVTIDRVMSYLNASGGGGSRVESKYGPPCPPCPAPEFLGGPSVFLFPPKPKDTLMISRTPEVTCVVVDVSQEDPEVQFNWYVDGVEVHNAKTKPREEQFNSTYRVVSVLTVLHQDWLNGKEYKCKVSNKGLPSSIEKTISKAKGQPREPQVYTLPPCQENMTKNQVSLTCLVKGFYPSDIAVEWESNGQPENNYKTTPPVLVSDGSFTLYSRLTVDKSRWQEGNVFSCSVMHEALHNHYTQKSLSLSLG

SEQ ID NO: 149 - protein, 536 aa, Artificial Sequence; identical to SEQ ID NO: 129
  Description of Artificial Sequence: Synthetic polypeptide

SEQ ID NO: 150 - protein, 437 aa, Artificial Sequence
  Description of Artificial Sequence: Synthetic polypeptide
RNLPVATPDPGMFPCLHHSQNLLRAVSNMLQKARQTLEFYPCTSEEIDHEDITKDKTSTVEACLPLELTKNESCLNSRETSFITNGSCLASRKTSFMMALCLSSIYEDLKMYQVEFKTMNAKLLMDPKRQIFLDQNMLAVIDELMQALNFNSETVPQKSSLEEPDFYKTKIKLCILLHAFRIRAVTIDRVMSYLNASGGGGSGGGGSRVESKYGPPCPPCPAPEFLGGPSVFLFPPKPKDTLMISRTPEVTCVVVDVSQEDPEVQFNWYVDGVEVHNAKTKPREEQFNSTYRVVSVLTVLHQDWLNGKEYKCKVSNKGLPSSIEKTISKAKGQPREPQVYTLPPCQENMTKNQVSLTCLVKGFYPSDIAVEWESNGQPENNYKTTPPVLVSDGSFTLYSRLTVDKSRWQEGNVFSCSVMHEALHNHYTQKSLSLSLG

SEQ ID NO: 151 - protein, 537 aa, Artificial Sequence; identical to SEQ ID NO: 137
  Description of Artificial Sequence: Synthetic polypeptide

SEQ ID NO: 152 - protein, 428 aa, Artificial Sequence
  Description of Artificial Sequence: Synthetic polypeptide
RNLPVATPDPGMFPCLHHSQNLLRAVSNMLQKARQTLEFYPCTSEEIDHEDITKDKTSTVEACLPLELTKNESCLNSRETSFITNGSCLASRKTSFMMALCLSSIYEDLKMYQVEFKTMNAKLLMDPKRQIFLDQNMLAVIDELMQALNFNSETVPQKSSLEEPDFYKTKIKLCILLHAFRIRAVTIDRVMSYLNASEPKSSDKTHTCPPCPAPELLGGPSVFLFPPKPKDTLMISRTPEVTCVVVDVSHEDPEVKFNWYVDGVEVHNAKTKPREEQYNSTYRVVSVLTVLHQDWLNGKEYKCKVSNKALPAPIEKTISKAKGQPREPRVYTLPPCRDELTKNQVSLTCLVKGFYPSDIAVEWESNGQPENNYKTTPPVLVSDGSFTLYSKLTVDKSRWQQGNVFSCSVMHEALHNHYTQKSLSLSPG

SEQ ID NO: 153 - protein, 537 aa, Artificial Sequence; identical to SEQ ID NO: 137
  Description of Artificial Sequence: Synthetic polypeptide

SEQ ID NO: 154 - protein, 433 aa, Artificial Sequence
  Description of Artificial Sequence: Synthetic polypeptide
RNLPVATPDPGMFPCLHHSQNLLRAVSNMLQKARQTLEFYPCTSEEIDHEDITKDKTSTVEACLPLELTKNESCLNSRETSFITNGSCLASRKTSFMMALCLSSIYEDLKMYQVEFKTMNAKLLMDPKRQIFLDQNMLAVIDELMQALNFNSETVPQKSSLEEPDFYKTKIKLCILLHAFRIRAVTIDRVMSYLNASGGGGSEPKSSDKTHTCPPCPAPELLGGPSVFLFPPKPKDTLMISRTPEVTCVVVDVSHEDPEVKFNWYVDGVEVHNAKTKPREEQYNSTYRVVSVLTVLHQDWLNGKEYKCKVSNKALPAPIEKTISKAKGQPREPRVYTLPPCRDELTKNQVSLTCLVKGFYPSDIAVEWESNGQPENNYKTTPPVLVSDGSFTLYSKLTVDKSRWQQGNVFSCSVMHEALHNHYTQKSLSLSPG

SEQ ID NO: 155 - protein, 537 aa, Artificial Sequence; identical to SEQ ID NO: 137
  Description of Artificial Sequence: Synthetic polypeptide

SEQ ID NO: 156 - protein, 438 aa, Artificial Sequence
  Description of Artificial Sequence: Synthetic polypeptide
RNLPVATPDPGMFPCLHHSQNLLRAVSNMLQKARQTLEFYPCTSEEIDHEDITKDKTSTVEACLPLELTKNESCLNSRETSFITNGSCLASRKTSFMMALCLSSIYEDLKMYQVEFKTMNAKLLMDPKRQIFLDQNMLAVIDELMQALNFNSETVPQKSSLEEPDFYKTKIKLCILLHAFRIRAVTIDRVMSYLNASGGGGSGGGGSEPKSSDKTHTCPPCPAPELLGGPSVFLFPPKPKDTLMISRTPEVTCVVVDVSHEDPEVKFNWYVDGVEVHNAKTKPREEQYNSTYRVVSVLTVLHQDWLNGKEYKCKVSNKALPAPIEKTISKAKGQPREPRVYTLPPCRDELTKNQVSLTCLVKGFYPSDIAVEWESNGQPENNYKTTPPVLVSDGSFTLYSKLTVDKSRWQQGNVFSCSVMHEALHNHYTQKSLSLSPG

SEQ ID NO: 157 - protein, 443 aa, Artificial Sequence
  Description of Artificial Sequence: Synthetic polypeptide
RNLPVATPDPGMFPCLHHSQNLLRAVSNMLQKARQTLEFYPCTSEEIDHEDITKDKTSTVEACLPLELTKNESCLNSRETSFITNGSCLASRKTSFMMALCLSSIYEDLKMYQVEFKTMNAKLLMDPKRQIFLDQNMLAVIDELMQALNFNSETVPQKSSLEEPDFYKTKIKLCILLHAFRIRAVTIDRVMSYLNASGGGGSGGGGSGGGGSEPKSSDKTHTCPPCPAPELLGGPSVFLFPPKPKDTLMISRTPEVTCVVVDVSHEDPEVKFNWYVDGVEVHNAKTKPREEQYNSTYRVVSVLTVLHQDWLNGKEYKCKVSNKALPAPIEKTISKAKGQPREPQVCTLPPSRDELTENQVSLTCLVKGFYPSDIAVEWESNGQPENNYKTTPPVLDSDGSFFLYSWLTVDKSRWQQGNVFSCSVMHEALHNHYTQKSLSLSPG

SEQ ID NO: 158 - protein, 537 aa, Artificial Sequence
  Description of Artificial Sequence: Synthetic polypeptide
IWELKKDVYVVELDWYPDAPGEMVVLTCDTPEEDGITWTLDQSSEVLGSGKTLTIQVKEFGDAGQYTCHKGGEVLSHSLLLLHKKEDGIWSTDILKDQKEPKNKTFLRCEAKNYSGRFTCWWLTTISTDLTFSVKSSRGSSDPQGVTCGAATLSAERVRGDNKEYEYSVECQEDSACPAAEESLPIEVMVDAVHKLKYENYTSSFFIRDIIKPDPPKNLQLKPLKNSRQVEVSWEYPDTWSTPHSYFSLTFCVQVQGKSKREKKDRVFTDKTSATVICRKNASISVRAQDRYYSSSWSEWASVPCSEPKSSDKTHTCPPCPAPELLGGPSVFLFPPKPKDTLMISRTPEVTCVVVDVSHEDPEVKFNWYVDGVEVHNAKTKPREEQYNSTYRVVSVLTVLHQDWLNGKEYKCKVSNKALPAPIEKTISKAKGQPREPRVYTLPPCRDELTKNQVSLTCLVKGFYPSDIAVEWESNGQPENNYKTTPPVLVSDGSFTLYSKLTVDKSRWQQGNVFSCSVMHEALHNHYTQKSLSLSPG

SEQ ID NO: 159 - protein, 542 aa, Artificial Sequence
  Description of Artificial Sequence: Synthetic polypeptide
IWELKKDVYVVELDWYPDAPGEMVVLTCDTPEEDGITWTLDQSSEVLGSGKTLTIQVKEFGDAGQYTCHKGGEVLSHSLLLLHKKEDGIWSTDILKDQKEPKNKTFLRCEAKNYSGRFTCWWLTTISTDLTFSVKSSRGSSDPQGVTCGAATLSAERVRGDNKEYEYSVECQEDSACPAAEESLPIEVMVDAVHKLKYENYTSSFFIRDIIKPDPPKNLQLKPLKNSRQVEVSWEYPDTWSTPHSYFSLTFCVQVQGKSKREKKDRVFTDKTSATVICRKNASISVRAQDRYYSSSWSEWASVPCSGGGGSEPKSSDKTHTCPPCPAPELLGGPSVFLFPPKPKDTLMISRTPEVTCVVVDVSHEDPEVKFNWYVDGVEVHNAKTKPREEQYNSTYRVVSVLTVLHQDWLNGKEYKCKVSNKALPAPIEKTISKAKGQPREPQVCTLPPSRDELTENQVSLTCLVKGFYPSDIAVEWESNGQPENNYKTTPPVLDSDGSFFLYSWLTVDKSRWQQGNVFSCSVMHEALHNHYTQKSLSLSPG

SEQ ID NO: 160 - protein, 433 aa, Artificial Sequence; identical to SEQ ID NO: 154
  Description of Artificial Sequence: Synthetic polypeptide

SEQ ID NO: 161 - protein, 542 aa, Artificial Sequence
  Description of Artificial Sequence: Synthetic polypeptide
IWELKKDVYVVELDWYPDAPGEMVVLTCDTPEEDGITWTLDQSSEVLGSGKTLTIQVKEFGDAGQYTCHKGGEVLSHSLLLLHKKEDGIWSTDILKDQKEPKNKTFLRCEAKNYSGRFTCWWLTTISTDLTFSVKSSRGSSDPQGVTCGAATLSAERVRGDNKEYEYSVECQEDSASPAAEESLPIEVMVDAVHKLKYENYTSSFFIRDIIKPDPPKNLQLKPLKNSRQVEVSWEYPDTWSTPHSYFSLTFCVQVQGKSKREKKDRVFTDKTSATVICRKNASISVRAQDRCYSSSWSEWASVPCSGGGGSEPKSSDKTHTCPPCPAPELLGGPSVFLFPPKPKDTLMISRTPEVTCVVVDVSHEDPEVKFNWYVDGVEVHNAKTKPREEQYNSTYRVVSVLTVLHQDWLNGKEYKCKVSNKALPAPIEKTISKAKGQPREPQVCTLPPSRDELTENQVSLTCLVKGFYPSDIAVEWESNGQPENNYKTTPPVLDSDGSFFLYSWLTVDKSRWQQGNVFSCSVMHEALHNHYTQKSLSLSPG

SEQ ID NO: 162 - protein, 433 aa, Artificial Sequence
  Description of Artificial Sequence: Synthetic polypeptide
RNLPVATPDPGMFPCLHHSQNLLRAVSNMLQKARQTLEFYPCTSEEIDHEDITKDKTSTVEACLPLELTKNESSLNSRETSFITNGSCLASRKTSFMMALCLSSIYEDLKMYQVEFKTMNAKLLMDPKRQIFLDQNMLAVIDELMQALNFNSETVPQKSSLEEPDFYKTKIKLCILLHAFRIRACTIDRVMSYLNASGGGGSEPKSSDKTHTCPPCPAPELLGGPSVFLFPPKPKDTLMISRTPEVTCVVVDVSHEDPEVKFNWYVDGVEVHNAKTKPREEQYNSTYRVVSVLTVLHQDWLNGKEYKCKVSNKALPAPIEKTISKAKGQPREPRVYTLPPCRDELTKNQVSLTCLVKGFYPSDIAVEWESNGQPENNYKTTPPVLVSDGSFTLYSKLTVDKSRWQQGNVFSCSVMHEALHNHYTQKSLSLSPG

SEQ ID NO: 163 - protein, 536 aa, Artificial Sequence
  Description of Artificial Sequence: Synthetic polypeptide
IWELKKDVYVVELDWYPDAPGEMVVLTCDTPEEDGITWTLDQSSEVLGSGKTLTIQVKEFGDAGQYTCHKGGEVLSHSLLLLHKKEDGIWSTDILKDQKEPKNKTFLRCEAKNYSGRFTCWWLTTISTDLTFSVKSSRGSSDPQGVTCGAATLSAERVRGDNKEYEYSVECQEDSASPAAEESLPIEVMVDAVHKLKYENYTSSFFIRDIIKPDPPKNLQLKPLKNSRQVEVSWEYPDTWSTPHSYFSLTFCVQVQGKSKREKKDRVFTDKTSATVICRKNASISVRAQDRCYSSSWSEWASVPCSRVESKYGPPCPPCPAPEFLGGPSVFLFPPKPKDTLMISRTPEVTCVVVDVSQEDPEVQFNWYVDGVEVHNAKTKPREEQFNSTYRVVSVLTVLHQDWLNGKEYKCKVSNKGLPSSIEKTISKAKGQPREPQVCTLPPSQEEMTKNQVSLTCLVEGFYPSDIAVEWESNGQPENNYKTTPPVLDSDGSFFLYSWLTVDKSRWQEGNVFSCSVMHEALHNHYTQKSLSLSLG

SEQ ID NO: 164 - protein, 442 aa, Artificial Sequence
  Description of Artificial Sequence: Synthetic polypeptide
RNLPVATPDPGMFPCLHHSQNLLRAVSNMLQKARQTLEFYPCTSEEIDHEDITKDKTSTVEACLPLELTKNESSLNSRETSFITNGSCLASRKTSFMMALCLSSIYEDLKMYQVEFKTMNAKLLMDPKRQIFLDQNMLAVIDELMQALNFNSETVPQKSSLEEPDFYKTKIKLCILLHAFRIRACTIDRVMSYLNASGGGGSGGGGSGGGGSRVESKYGPPCPPCPAPEFLGGPSVFLFPPKPKDTLMISRTPEVTCVVVDVSQEDPEVQFNWYVDGVEVHNAKTKPREEQFNSTYRVVSVLTVLHQDWLNGKEYKCKVSNKGLPSSIEKTISKAKGQPREPQVYTLPPCQENMTKNQVSLTCLVKGFYPSDIAVEWESNGQPENNYKTTPPVLVSDGSFTLYSRLTVDKSRWQEGNVFSCSVMHEALHNHYTQKSLSLSLG

SEQ ID NO: 165 - protein, 536 aa, Artificial Sequence
  Description of Artificial Sequence: Synthetic polypeptide
IWELKKDVYVVELDWYPDAPGEMVVLTCDTPEEDGITWTLDQSSEVLGSGKTLTIQVKEFGDAGQYTCHKGGEVLSHSLLLLHKKEDGIWSTDILKDQKEPKNKTFLRCEAKNYSGRFTCWWLTTISTDLTFSVKSSRGSSDPQGVTCGAATLSAERVRGDNKEYEYSVECQEDSASPAAEESLPIEVMVDAVHKLKYENYTSSFFIRDIIKPDPPKNLQLKPLKNSRQVEVSWEYPDTWSTPHSYFSLTFCVQVQGKSKREKKDRVFTDKTSATVICRKNASISVRAQDRCYSSSWSEWASVPCSRVESKYGPPCPPCPAPEFLGGPSVFLFPPKPKDTLMISRTPEVTCVVVDVSQEDPEVQFNWYVDGVEVHNAKTKPREEQFNSTYRVVSVLTVLHQDWLNGKEYKCKVSNKGLPSSIEKTISKAKGQPREPQVCTLPPSQEEMTENQVSLTCLVKGFYPSDIAVEWESNGQPENNYKTTPPVLDSDGSFFLYSWLTVDKSRWQEGNVFSCSVMHEALHNHYTQKSLSLSLG

SEQ ID NO: 166 - protein, 442 aa, Artificial Sequence
  Description of Artificial Sequence: Synthetic polypeptide
RNLPVATPDPGMFPCLHHSQNLLRAVSNMLQKARQTLEFYPCTSEEIDHEDITKDKTSTVEACLPLELTKNESSLNSRETSFITNGSCLASRKTSFMMALCLSSIYEDLKMYQVEFKTMNAKLLMDPKRQIFLDQNMLAVIDELMQALNFNSETVPQKSSLEEPDFYKTKIKLCILLHAFRIRACTIDRVMSYLNASGGGGSGGGGSGGGGSRVESKYGPPCPPCPAPEFLGGPSVFLFPPKPKDTLMISRTPEVTCVVVDVSQEDPEVQFNWYVDGVEVHNAKTKPREEQFNSTYRVVSVLTVLHQDWLNGKEYKCKVSNKGLPSSIEKTISKAKGQPREPRVYTLPPCQEEMTKNQVSLTCLVKGFYPSDIAVEWESNGQPENNYKTTPPVLVSDGSFTLYSRLTVDKSRWQEGNVFSCSVMHEALHNHYTQKSLSLSLG

SEQ ID NO: 167 - protein, 536 aa, Artificial Sequence
  Description of Artificial Sequence: Synthetic polypeptide
IWELKKDVYVVELDWYPDAPGEMVVLTCDTPEEDGITWTLDQSSEVLGSGKTLTIQVKEFGDAGQYTCHKGGEVLSHSLLLLHKKEDGIWSTDILKDQKEPKNKTFLRCEAKNYSGRFTCWWLTTISTDLTFSVKSSRGSSDPQGVTCGAATLSAERVRGDNKEYEYSVECQEDSASPAAEESLPIEVMVDAVHKLKYENYTSSFFIRDIIKPDPPKNLQLKPLKNSRQVEVSWEYPDTWSTPHSYFSLTFCVQVQGKSKREKKDRVFTDKTSATVICRKNASISVRAQDRCYSSSWSEWASVPCSRVESKYGPPCPPCPAPEFEGGPSVFLFPPKPKDTLMISRTPEVTCVVVDVSQEDPEVQFNWYVDGVEVHNAKTKPREEQFNSTYRVVSVLTVLHQDWLNGKEYKCKVSNKGLPSSIEKTISKAKGQPREPQVCTLPPSQEEMTENQVSLTCLVKGFYPSDIAVEWESNGQPENNYKTTPPVLDSDGSFFLYSWLTVDKSRWQEGNVFSCSVMHEALHNHYTQKSLSLSLG

SEQ ID NO: 168 - protein, 442 aa, Artificial Sequence
  Description of Artificial Sequence: Synthetic polypeptide
RNLPVATPDPGMFPCLHHSQNLLRAVSNMLQKARQTLEFYPCTSEEIDHEDITKDKTSTVEACLPLELTKNESSLNSRETSFITNGSCLASRKTSFMMALCLSSIYEDLKMYQVEFKTMNAKLLMDPKRQIFLDQNMLAVIDELMQALNFNSETVPQKSSLEEPDFYKTKIKLCILLHAFRIRACTIDRVMSYLNASGGGGSGGGGSGGGGSRVESKYGPPCPPCPAPEFEGGPSVFLFPPKPKDTLMISRTPEVTCVVVDVSQEDPEVQFNWYVDGVEVHNAKTKPREEQFNSTYRVVSVLTVLHQDWLNGKEYKCKVSNKGLPSSIEKTISKAKGQPREPRVYTLPPCQEEMTKNQVSLTCLVKGFYPSDIAVEWESNGQPENNYKTTPPVLVSDGSFTLYSRLTVDKSRWQEGNVFSCSVMHEALHNHYTQKSLSLSLG

SEQ ID NO: 169 - protein, 536 aa, Artificial Sequence
  Description of Artificial Sequence: Synthetic polypeptide
IWELKKDVYVVELDWYPDAPGEMVVLTCDTPEEDGITWTLDQSSEVLGSGKTLTIQVKEFGDAGQYTCHKGGEVLSHSLLLLHKKEDGIWSTDILKDQKEPKNKTFLRCEAKNYSGRFTCWWLTTISTDLTFSVKSSRGSSDPQGVTCGAATLSAERVRGDNKEYEYSVECQEDSASPAAEESLPIEVMVDAVHKLKYENYTSSFFIRDIIKPDPPKNLQLKPLKNSRQVEVSWEYPDTWSTPHSYFSLTFCVQVQGKSKREKKDRVFTDKTSATVICRKNASISVRAQDRCYSSSWSEWASVPCSRVESKYGPPCPPCPAPEFEGGPSVFLFPPKPKDTLMISRTPEVTCVVVDVSQEDPEVQFNWYVDGVEVHNAKTKPREEQFNSTYRVVSVLTVLHQDWLNGKEYKCKVSNKGLASSIEKTISKAKGQPREPQVCTLPPSQEEMTENQVSLTCLVKGFYPSDIAVEWESNGQPENNYKTTPPVLDSDGSFFLYSWLTVDKSRWQEGNVFSCSVMHEALHNHYTQKSLSLSLG

SEQ ID NO: 170 - protein, 442 aa, Artificial Sequence
  Description of Artificial Sequence: Synthetic polypeptide
RNLPVATPDPGMFPCLHHSQNLLRAVSNMLQKARQTLEFYPCTSEEIDHEDITKDKTSTVEACLPLELTKNESSLNSRETSFITNGSCLASRKTSFMMALCLSSIYEDLKMYQVEFKTMNAKLLMDPKRQIFLDQNMLAVIDELMQALNFNSETVPQKSSLEEPDFYKTKIKLCILLHAFRIRACTIDRVMSYLNASGGGGSGGGGSGGGGSRVESKYGPPCPPCPAPEFEGGPSVFLFPPKPKDTLMISRTPEVTCVVVDVSQEDPEVQFNWYVDGVEVHNAKTKPREEQFNSTYRVVSVLTVLHQDWLNGKEYKCKVSNKGLASSIEKTISKAKGQPREPRVYTLPPCQEEMTKNQVSLTCLVKGFYPSDIAVEWESNGQPENNYKTTPPVLVSDGSFTLYSRLTVDKSRWQEGNVFSCSVMHEALHNHYTQKSLSLSLG

SEQ ID NO: 171 - protein, 537 aa, Artificial Sequence
  Description of Artificial Sequence: Synthetic polypeptide
IWELKKDVYVVELDWYPDAPGEMVVLTCDTPEEDGITWTLDQSSEVLGSGKTLTIQVKEFGDAGQYTCHKGGEVLSHSLLLLHKKEDGIWSTDILKDQKEPKNKTFLRCEAKNYSGRFTCWWLTTISTDLTFSVKSSRGSSDPQGVTCGAATLSAERVRGDNKEYEYSVECQEDSASPAAEESLPIEVMVDAVHKLKYENYTSSFFIRDIIKPDPPKNLQLKPLKNSRQVEVSWEYPDTWSTPHSYFSLTFCVQVQGKSKREKKDRVFTDKTSATVICRKNASISVRAQDRCYSSSWSEWASVPCSEPKSSDKTHTCPPCPAPELLGGPSVFLFPPKPKDTLMISRTPEVTCVVVDVSHEDPEVKFNWYVDGVEVHNAKTKPREEQYNSTYRVVSVLTVLHQDWLNGKEYKCKVSNKALPAPIEKTISKAKGQPREPQVCTLPPSRDELTENQVSLTCLVKGFYPSDIAVEWESNGQPENNYKTTPPVLDSDGSFFLYSWLTVDKSRWQQGNVFSCSVMHEALHNHYTQKSLSLSPG

SEQ ID NO: 172 - protein, 443 aa, Artificial Sequence
  Description of Artificial Sequence: Synthetic polypeptide
RNLPVATPDPGMFPCLHHSQNLLRAVSNMLQKARQTLEFYPCTSEEIDHEDITKDKTSTVEACLPLELTKNESSLNSRETSFITNGSCLASRKTSFMMALCLSSIYEDLKMYQVEFKTMNAKLLMDPKRQIFLDQNMLAVIDELMQALNFNSETVPQKSSLEEPDFYKTKIKLCILLHAFRIRACTIDRVMSYLNASGGGGSGGGGSGGGGSEPKSSDKTHTCPPCPAPELLGGPSVFLFPPKPKDTLMISRTPEVTCVVVDVSHEDPEVKFNWYVDGVEVHNAKTKPREEQYNSTYRVVSVLTVLHQDWLNGKEYKCKVSNKALPAPIEKTISKAKGQPREPRVYTLPPCRDELTKNQVSLTCLVKGFYPSDIAVEWESNGQPENNYKTTPPVLVSDGSFTLYSKLTVDKSRWQQGNVFSCSVMHEALHNHYTQKSLSLSPG

SEQ ID NO: 173 - protein, 537 aa, Artificial Sequence
  Description of Artificial Sequence: Synthetic polypeptide
IWELKKDVYVVELDWYPDAPGEMVVLTCDTPEEDGITWTLDQSSEVLGSGKTLTIQVKEFGDAGQYTCHKGGEVLSHSLLLLHKKEDGIWSTDILKDQKEPKNKTFLRCEAKNYSGRFTCWWLTTISTDLTFSVKSSRGSSDPQGVTCGAATLSAERVRGDNKEYEYSVECQEDSASPAAEESLPIEVMVDAVHKLKYENYTSSFFIRDIIKPDPPKNLQLKPLKNSRQVEVSWEYPDTWSTPHSYFSLTFCVQVQGKSKREKKDRVFTDKTSATVICRKNASISVRAQDRCYSSSWSEWASVPCSEPKSSDKTHTCPPCPAPEAAGGPSVFLFPPKPKDTLMISRTPEVTCVVVDVSHEDPEVKFNWYVDGVEVHNAKTKPREEQYNSTYRVVSVLTVLHQDWLNGKEYKCKVSNKALPAPIEKTISKAKGQPREPQVCTLPPSRDELTENQVSLTCLVKGFYPSDIAVEWESNGQPENNYKTTPPVLDSDGSFFLYSWLTVDKSRWQQGNVFSCSVMHEALHNHYTQKSLSLSPG

SEQ ID NO: 174 - protein, 443 aa, Artificial Sequence
  Description of Artificial Sequence: Synthetic polypeptide
RNLPVATPDPGMFPCLHHSQNLLRAVSNMLQKARQTLEFYPCTSEEIDHEDITKDKTSTVEACLPLELTKNESSLNSRETSFITNGSCLASRKTSFMMALCLSSIYEDLKMYQVEFKTMNAKLLMDPKRQIFLDQNMLAVIDELMQALNFNSETVPQKSSLEEPDFYKTKIKLCILLHAFRIRACTIDRVMSYLNASGGGGSGGGGSGGGGSEPKSSDKTHTCPPCPAPEAAGGPSVFLFPPKPKDTLMISRTPEVTCVVVDVSHEDPEVKFNWYVDGVEVHNAKTKPREEQYNSTYRVVSVLTVLHQDWLNGKEYKCKVSNKALPAPIEKTISKAKGQPREPRVYTLPPCRDELTKNQVSLTCLVKGFYPSDIAVEWESNGQPENNYKTTPPVLVSDGSFTLYSKLTVDKSRWQQGNVFSCSVMHEALHNHYTQKSLSLSPG

SEQ ID NO: 175 - protein, 537 aa, Artificial Sequence
  Description of Artificial Sequence: Synthetic polypeptide
IWELKKDVYVVELDWYPDAPGEMVVLTCDTPEEDGITWTLDQSSEVLGSGKTLTIQVKEFGDAGQYTCHKGGEVLSHSLLLLHKKEDGIWSTDILKDQKEPKNKTFLRCEAKNYSGRFTCWWLTTISTDLTFSVKSSRGSSDPQGVTCGAATLSAERVRGDNKEYEYSVECQEDSASPAAEESLPIEVMVDAVHKLKYENYTSSFFIRDIIKPDPPKNLQLKPLKNSRQVEVSWEYPDTWSTPHSYFSLTFCVQVQGKSKREKKDRVFTDKTSATVICRKNASISVRAQDRCYSSSWSEWASVPCSEPKSSDKTHTCPPCPAPEAAGGPSVFLFPPKPKDTLMISRTPEVTCVVVDVSHEDPEVKFNWYVDGVEVHNAKTKPREEQYNSTYRVVSVLTVLHQDWLNGKEYKCKVSNKALAAPIEKTISKAKGQPREPQVCTLPPSRDELTENQVSLTCLVKGFYPSDIAVEWESNGQPENNYKTTPPVLDSDGSFFLYSWLTVDKSRWQQGNVFSCSVMHEALHNHYTQKSLSLSPG

SEQ ID NO: 176 - protein, 443 aa, Artificial Sequence
  Description of Artificial Sequence: Synthetic polypeptide
RNLPVATPDPGMFPCLHHSQNLLRAVSNMLQKARQTLEFYPCTSEEIDHEDITKDKTSTVEACLPLELTKNESSLNSRETSFITNGSCLASRKTSFMMALCLSSIYEDLKMYQVEFKTMNAKLLMDPKRQIFLDQNMLAVIDELMQALNFNSETVPQKSSLEEPDFYKTKIKLCILLHAFRIRACTIDRVMSYLNASGGGGSGGGGSGGGGSEPKSSDKTHTCPPCPAPEAAGGPSVFLFPPKPKDTLMISRTPEVTCVVVDVSHEDPEVKFNWYVDGVEVHNAKTKPREEQYNSTYRVVSVLTVLHQDWLNGKEYKCKVSNKALAAPIEKTISKAKGQPREPRVYTLPPCRDELTKNQVSLTCLVKGFYPSDIAVEWESNGQPENNYKTTPPVLVSDGSFTLYSKLTVDKSRWQQGNVFSCSVMHEALHNHYTQKSLSLSPG

SEQ ID NO: 177 - protein, 537 aa, Artificial Sequence
  Description of Artificial Sequence: Synthetic polypeptide
IWELKKDVYVVELDWYPDAPGEMVVLTCDTPEEDGITWTLDQSSEVLGSGKTLTIQVKEFGDAGQYTCHKGGEVLSHSLLLLHKKEDGIWSTDILKDQKEPKNKTFLRCEAKNYSGRFTCWWLTTISTDLTFSVKSSRGSSDPQGVTCGAATLSAERVRGDNKEYEYSVECQEDSASPAAEESLPIEVMVDAVHKLKYENYTSSFFIRDIIKPDPPKNLQLKPLKNSRQVEVSWEYPDTWSTPHSYFSLTFCVQVQGKSKREKKDRVFTDKTSATVICRKNASISVRAQDRCYSSSWSEWASVPCSEPKSSDKTHTCPPCPAPEAEGAPSVFLFPPKPKDTLMISRTPEVTCVVVDVSHEDPEVKFNWYVDGVEVHNAKTKPREEQYNSTYRVVSVLTVLHQDWLNGKEYKCKVSNKALPSSIEKTISKAKGQPREPQVCTLPPSRDELTENQVSLTCLVKGFYPSDIAVEWESNGQPENNYKTTPPVLDSDGSFFLYSWLTVDKSRWQQGNVFSCSVMHEALHNHYTQKSLSLSPG

SEQ ID NO: 178 - protein, 443 aa, Artificial Sequence
  Description of Artificial Sequence: Synthetic polypeptide
RNLPVATPDPGMFPCLHHSQNLLRAVSNMLQKARQTLEFYPCTSEEIDHEDITKDKTSTVEACLPLELTKNESSLNSRETSFITNGSCLASRKTSFMMALCLSSIYEDLKMYQVEFKTMNAKLLMDPKRQIFLDQNMLAVIDELMQALNFNSETVPQKSSLEEPDFYKTKIKLCILLHAFRIRACTIDRVMSYLNASGGGGSGGGGSGGGGSEPKSSDKTHTCPPCPAPEAEGAPSVFLFPPKPKDTLMISRTPEVTCVVVDVSHEDPEVKFNWYVDGVEVHNAKTKPREEQYNSTYRVVSVLTVLHQDWLNGKEYKCKVSNKALPSSIEKTISKAKGQPREPRVYTLPPCRDELTKNQVSLTCLVKGFYPSDIAVEWESNGQPENNYKTTPPVLVSDGSFTLYSKLTVDKSRWQQGNVFSCSVMHEALHNHYTQKSLSLSPG

SEQ ID NO: 179 - protein, 536 aa, Artificial Sequence
  Description of Artificial Sequence: Synthetic polypeptide
IWELKKDVYVVELDWYPDAPGEMVVLTCDTPEEDGITWTLDQSSEVLGSGKTLTIQVKEFGDAGQYTCHKGGEVLSHSLLLLHKKEDGIWSTDILKDQKEPKNKTFLRCEAKNYSGRFTCWWLTTISTDLTFSVKSSRGSSDPQGVTCGAATLSAERVRGDNKEYEYSVECQEDSACPAAEESLPIEVMVDAVHKLKYENYTSSFFIRDIIKPDPPKNLQLKPLKNSRQVEVSWEYPDTWSTPHSYFSLTFCVQVQGKSKREKKDRVFTDKTSATVICRKNASISVRAQDRCYSSSWSEWASVPCSRVESKYGPPCPPCPAPEFLGGPSVFLFPPKPKDTLMISRTPEVTCVVVDVSQEDPEVQFNWYVDGVEVHNAKTKPREEQFNSTYRVVSVLTVLHQDWLNGKEYKCKVSNKGLPSSIEKTISKAKGQPREPQVCTLPPSQEEMTKNQVSLTCLVEGFYPSDIAVEWESNGQPENNYKTTPPVLDSDGSFFLYSWLTVDKSRWQEGNVFSCSVMHEALHNHYTQKSLSLSLG

SEQ ID NO: 180 - protein, 442 aa, Artificial Sequence
  Description of Artificial Sequence: Synthetic polypeptide
RNLPVATPDPGMFPCLHHSQNLLRAVSNMLQKARQTLEFYPCTSEEIDHEDITKDKTSTVEACLPLELTKNESCLNSRETSFITNGSCLASRKTSFMMALCLSSIYEDLKMYQVEFKTMNAKLLMDPKRQIFLDQNMLAVIDELMQALNFNSETVPQKSSLEEPDFYKTKIKLCILLHAFRIRACTIDRVMSYLNASGGGGSGGGGSGGGGSRVESKYGPPCPPCPAPEFLGGPSVFLFPPKPKDTLMISRTPEVTCVVVDVSQEDPEVQFNWYVDGVEVHNAKTKPREEQFNSTYRVVSVLTVLHQDWLNGKEYKCKVSNKGLPSSIEKTISKAKGQPREPQVYTLPPCQENMTKNQVSLTCLVKGFYPSDIAVEWESNGQPENNYKTTPPVLVSDGSFTLYSRLTVDKSRWQEGNVFSCSVMHEALHNHYTQKSLSLSLG

SEQ ID NO: 181 - protein, 536 aa, Artificial Sequence
  Description of Artificial Sequence: Synthetic polypeptide
IWELKKDVYVVELDWYPDAPGEMVVLTCDTPEEDGITWTLDQSSEVLGSGKTLTIQVKEFGDAGQYTCHKGGEVLSHSLLLLHKKEDGIWSTDILKDQKEPKNKTFLRCEAKNYSGRFTCWWLTTISTDLTFSVKSSRGSSDPQGVTCGAATLSAERVRGDNKEYEYSVECQEDSACPAAEESLPIEVMVDAVHKLKYENYTSSFFIRDIIKPDPPKNLQLKPLKNSRQVEVSWEYPDTWSTPHSYFSLTFCVQVQGKSKREKKDRVFTDKTSATVICRKNASISVRAQDRCYSSSWSEWASVPCSRVESKYGPPCPPCPAPEFLGGPSVFLFPPKPKDTLMISRTPEVTCVVVDVSQEDPEVQFNWYVDGVEVHNAKTKPREEQFNSTYRVVSVLTVLHQDWLNGKEYKCKVSNKGLPSSIEKTISKAKGQPREPQVCTLPPSQEEMTENQVSLTCLVKGFYPSDIAVEWESNGQPENNYKTTPPVLDSDGSFFLYSWLTVDKSRWQEGNVFSCSVMHEALHNHYTQKSLSLSLG

SEQ ID NO: 182 - protein, 442 aa, Artificial Sequence
  Description of Artificial Sequence: Synthetic polypeptide
RNLPVATPDPGMFPCLHHSQNLLRAVSNMLQKARQTLEFYPCTSEEIDHEDITKDKTSTVEACLPLELTKNESCLNSRETSFITNGSCLASRKTSFMMALCLSSIYEDLKMYQVEFKTMNAKLLMDPKRQIFLDQNMLAVIDELMQALNFNSETVPQKSSLEEPDFYKTKIKLCILLHAFRIRACTIDRVMSYLNASGGGGSGGGGSGGGGSRVESKYGPPCPPCPAPEFLGGPSVFLFPPKPKDTLMISRTPEVTCVVVDVSQEDPEVQFNWYVDGVEVHNAKTKPREEQFNSTYRVVSVLTVLHQDWLNGKEYKCKVSNKGLPSSIEKTISKAKGQPREPRVYTLPPCQEEMTKNQVSLTCLVKGFYPSDIAVEWESNGQPENNYKTTPPVLVSDGSFTLYSRLTVDKSRWQEGNVFSCSVMHEALHNHYTQKSLSLSLG

SEQ ID NO: 183 - protein, 536 aa, Artificial Sequence
  Description of Artificial Sequence: Synthetic polypeptide
IWELKKDVYVVELDWYPDAPGEMVVLTCDTPEEDGITWTLDQSSEVLGSGKTLTIQVKEFGDAGQYTCHKGGEVLSHSLLLLHKKEDGIWSTDILKDQKEPKNKTFLRCEAKNYSGRFTCWWLTTISTDLTFSVKSSRGSSDPQGVTCGAATLSAERVRGDNKEYEYSVECQEDSACPAAEESLPIEVMVDAVHKLKYENYTSSFFIRDIIKPDPPKNLQLKPLKNSRQVEVSWEYPDTWSTPHSYFSLTFCVQVQGKSKREKKDRVFTDKTSATVICRKNASISVRAQDRCYSSSWSEWASVPCSRVESKYGPPCPPCPAPEFEGGPSVFLFPPKPKDTLMISRTPEVTCVVVDVSQEDPEVQFNWYVDGVEVHNAKTKPREEQFNSTYRVVSVLTVLHQDWLNGKEYKCKVSNKGLPSSIEKTISKAKGQPREPQVCTLPPSQEEMTENQVSLTCLVKGFYPSDIAVEWESNGQPENNYKTTPPVLDSDGSFFLYSWLTVDKSRWQEGNVFSCSVMHEALHNHYTQKSLSLSLG

SEQ ID NO: 184 - protein, 442 aa, Artificial Sequence
  Description of Artificial Sequence: Synthetic polypeptide
RNLPVATPDPGMFPCLHHSQNLLRAVSNMLQKARQTLEFYPCTSEEIDHEDITKDKTSTVEACLPLELTKNESCLNSRETSFITNGSCLASRKTSFMMALCLSSIYEDLKMYQVEFKTMNAKLLMDPKRQIFLDQNMLAVIDELMQALNFNSETVPQKSSLEEPDFYKTKIKLCILLHAFRIRACTIDRVMSYLNASGGGGSGGGGSGGGGSRVESKYGPPCPPCPAPEFEGGPSVFLFPPKPKDTLMISRTPEVTCVVVDVSQEDPEVQFNWYVDGVEVHNAKTKPREEQFNSTYRVVSVLTVLHQDWLNGKEYKCKVSNKGLPSSIEKTISKAKGQPREPRVYTLPPCQEEMTKNQVSLTCLVKGFYPSDIAVEWESNGQPENNYKTTPPVLVSDGSFTLYSRLTVDKSRWQEGNVFSCSVMHEALHNHYTQKSLSLSLG

SEQ ID NO: 185 - protein, 536 aa, Artificial Sequence
  Description of Artificial Sequence: Synthetic polypeptide
IWELKKDVYVVELDWYPDAPGEMVVLTCDTPEEDGITWTLDQSSEVLGSGKTLTIQVKEFGDAGQYTCHKGGEVLSHSLLLLHKKEDGIWSTDILKDQKEPKNKTFLRCEAKNYSGRFTCWWLTTISTDLTFSVKSSRGSSDPQGVTCGAATLSAERVRGDNKEYEYSVECQEDSACPAAEESLPIEVMVDAVHKLKYENYTSSFFIRDIIKPDPPKNLQLKPLKNSRQVEVSWEYPDTWSTPHSYFSLTFCVQVQGKSKREKKDRVFTDKTSATVICRKNASISVRAQDRCYSSSWSEWASVPCSRVESKYGPPCPPCPAPEFEGGPSVFLFPPKPKDTLMISRTPEVTCVVVDVSQEDPEVQFNWYVDGVEVHNAKTKPREEQFNSTYRVVSVLTVLHQDWLNGKEYKCKVSNKGLASSIEKTISKAKGQPREPQVCTLPPSQEEMTENQVSLTCLVKGFYPSDIAVEWESNGQPENNYKTTPPVLDSDGSFFLYSWLTVDKSRWQEGNVFSCSVMHEALHNHYTQKSLSLSLG

SEQ ID NO: 186 - protein, 442 aa, Artificial Sequence
  Description of Artificial Sequence: Synthetic polypeptide
RNLPVATPDPGMFPCLHHSQNLLRAVSNMLQKARQTLEFYPCTSEEIDHEDITKDKTSTVEACLPLELTKNESCLNSRETSFITNGSCLASRKTSFMMALCLSSIYEDLKMYQVEFKTMNAKLLMDPKRQIFLDQNMLAVIDELMQALNFNSETVPQKSSLEEPDFYKTKIKLCILLHAFRIRACTIDRVMSYLNASGGGGSGGGGSGGGGSRVESKYGPPCPPCPAPEFEGGPSVFLFPPKPKDTLMISRTPEVTCVVVDVSQEDPEVQFNWYVDGVEVHNAKTKPREEQFNSTYRVVSVLTVLHQDWLNGKEYKCKVSNKGLASSIEKTISKAKGQPREPRVYTLPPCQEEMTKNQVSLTCLVKGFYPSDIAVEWESNGQPENNYKTTPPVLVSDGSFTLYSRLTVDKSRWQEGNVFSCSVMHEALHNHYTQKSLSLSLG

SEQ ID NO: 187 - protein, 537 aa, Artificial Sequence
  Description of Artificial Sequence: Synthetic polypeptide
IWELKKDVYVVELDWYPDAPGEMVVLTCDTPEEDGITWTLDQSSEVLGSGKTLTIQVKEFGDAGQYTCHKGGEVLSHSLLLLHKKEDGIWSTDILKDQKEPKNKTFLRCEAKNYSGRFTCWWLTTISTDLTFSVKSSRGSSDPQGVTCGAATLSAERVRGDNKEYEYSVECQEDSACPAAEESLPIEVMVDAVHKLKYENYTSSFFIRDIIKPDPPKNLQLKPLKNSRQVEVSWEYPDTWSTPHSYFSLTFCVQVQGKSKREKKDRVFTDKTSATVICRKNASISVRAQDRCYSSSWSEWASVPCSEPKSSDKTHTCPPCPAPELLGGPSVFLFPPKPKDTLMISRTPEVTCVVVDVSHEDPEVKFNWYVDGVEVHNAKTKPREEQYNSTYRVVSVLTVLHQDWLNGKEYKCKVSNKALPAPIEKTISKAKGQPREPQVCTLPPSRDELTENQVSLTCLVKGFYPSDIAVEWESNGQPENNYKTTPPVLDSDGSFFLYSWLTVDKSRWQQGNVFSCSVMHEALHNHYTQKSLSLSPG

SEQ ID NO: 188 - protein, 443 aa, Artificial Sequence
  Description of Artificial Sequence: Synthetic polypeptide
RNLPVATPDPGMFPCLHHSQNLLRAVSNMLQKARQTLEFYPCTSEEIDHEDITKDKTSTVEACLPLELTKNESCLNSRETSFITNGSCLASRKTSFMMALCLSSIYEDLKMYQVEFKTMNAKLLMDPKRQIFLDQNMLAVIDELMQALNFNSETVPQKSSLEEPDFYKTKIKLCILLHAFRIRACTIDRVMSYLNASGGGGSGGGGSGGGGSEPKSSDKTHTCPPCPAPELLGGPSVFLFPPKPKDTLMISRTPEVTCVVVDVSHEDPEVKFNWYVDGVEVHNAKTKPREEQYNSTYRVVSVLTVLHQDWLNGKEYKCKVSNKALPAPIEKTISKAKGQPREPRVYTLPPCRDELTKNQVSLTCLVKGFYPSDIAVEWESNGQPENNYKTTPPVLVSDGSFTLYSKLTVDKSRWQQGNVFSCSVMHEALHNHYTQKSLSLSPG

SEQ ID NO: 189 - protein, 540 aa, Artificial Sequence
  Description of Artificial Sequence: Synthetic polypeptide
IWELKKDVYVVELDWYPDAPGEMVVLTCDTPEEDGITWTLDQSSEVLGSGKTLTIQVKEFGDAGQYTCHKGGEVLSHSLLLLHKKEDGIWSTDILKDQKEPKNKTFLRCEAKNYSGRFTCWWLTTISTDLTFSVKSSRGSSDPQGVTCGAATLSAERVRGDNKEYEYSVECQEDSACPAAEESLPIEVMVDAVHKLKYENYTSSFFIRDIIKPDPPKNLQLKPLKNSRQVEVSWEYPDTWSTPHSYFSLTFCVQVQGKSKREKKDRVFTDKTSATVICRKNASISVRAQDRCYSSSWSEWASVPCSEPKSSDKTHTCPPCPAPEAAGGPSVFLFPPKPKDTLMISRTPEVTCVVVDVSHEDPEVKFNWYVDGVEVHNAKTKPREEQYNSTYRVVSVLTVLHQDWLNGKEYKCKVSNKALPAPIEKTISKAKGQPREPQVCTLPPSRDELTENQVSLTCLVKGFYPSDIAVEWESNGQPENNYKTTPPVLDSDGSFFLYSWLTVDKSRWQQGNVFSCSVMHEALHNHYTQKSLSLSPGPKS

SEQ ID NO: 190 - protein, 443 aa, Artificial Sequence
  Description of Artificial Sequence: Synthetic polypeptide
RNLPVATPDPGMFPCLHHSQNLLRAVSNMLQKARQTLEFYPCTSEEIDHEDITKDKTSTVEACLPLELTKNESCLNSRETSFITNGSCLASRKTSFMMALCLSSIYEDLKMYQVEFKTMNAKLLMDPKRQIFLDQNMLAVIDELMQALNFNSETVPQKSSLEEPDFYKTKIKLCILLHAFRIRACTIDRVMSYLNASGGGGSGGGGSGGGGSEPKSSDKTHTCPPCPAPEAAGGPSVFLFPPKPKDTLMISRTPEVTCVVVDVSHEDPEVKFNWYVDGVEVHNAKTKPREEQYNSTYRVVSVLTVLHQDWLNGKEYKCKVSNKALPAPIEKTISKAKGQPREPRVYTLPPCRDELTKNQVSLTCLVKGFYPSDIAVEWESNGQPENNYKTTPPVLVSDGSFTLYSKLTVDKSRWQQGNVFSCSVMHEALHNHYTQKSLSLSPG

SEQ ID NO: 191 - protein, 537 aa, Artificial Sequence
  Description of Artificial Sequence: Synthetic polypeptide
IWELKKDVYVVELDWYPDAPGEMVVLTCDTPEEDGITWTLDQSSEVLGSGKTLTIQVKEFGDAGQYTCHKGGEVLSHSLLLLHKKEDGIWSTDILKDQKEPKNKTFLRCEAKNYSGRFTCWWLTTISTDLTFSVKSSRGSSDPQGVTCGAATLSAERVRGDNKEYEYSVECQEDSACPAAEESLPIEVMVDAVHKLKYENYTSSFFIRDIIKPDPPKNLQLKPLKNSRQVEVSWEYPDTWSTPHSYFSLTFCVQVQGKSKREKKDRVFTDKTSATVICRKNASISVRAQDRCYSSSWSEWASVPCSEPKSSDKTHTCPPCPAPEAAGGPSVFLFPPKPKDTLMISRTPEVTCVVVDVSHEDPEVKFNWYVDGVEVHNAKTKPREEQYNSTYRVVSVLTVLHQDWLNGKEYKCKVSNKALAAPIEKTISKAKGQPREPQVCTLPPSRDELTENQVSLTCLVKGFYPSDIAVEWESNGQPENNYKTTPPVLDSDGSFFLYSWLTVDKSRWQQGNVFSCSVMHEALHNHYTQKSLSLSPG

SEQ ID NO: 192 - protein, 443 aa, Artificial Sequence
  Description of Artificial Sequence: Synthetic polypeptide
RNLPVATPDPGMFPCLHHSQNLLRAVSNMLQKARQTLEFYPCTSEEIDHEDITKDKTSTVEACLPLELTKNESCLNSRETSFITNGSCLASRKTSFMMALCLSSIYEDLKMYQVEFKTMNAKLLMDPKRQIFLDQNMLAVIDELMQALNFNSETVPQKSSLEEPDFYKTKIKLCILLHAFRIRACTIDRVMSYLNASGGGGSGGGGSGGGGSEPKSSDKTHTCPPCPAPEAAGGPSVFLFPPKPKDTLMISRTPEVTCVVVDVSHEDPEVKFNWYVDGVEVHNAKTKPREEQYNSTYRVVSVLTVLHQDWLNGKEYKCKVSNKALAAPIEKTISKAKGQPREPRVYTLPPCRDELTKNQVSLTCLVKGFYPSDIAVEWESNGQPENNYKTTPPVLVSDGSFTLYSKLTVDKSRWQQGNVFSCSVMHEALHNHYTQKSLSLSPG

SEQ ID NO: 193 - protein, 537 aa, Artificial Sequence
  Description of Artificial Sequence: Synthetic polypeptide
IWELKKDVYVVELDWYPDAPGEMVVLTCDTPEEDGITWTLDQSSEVLGSGKTLTIQVKEFGDAGQYTCHKGGEVLSHSLLLLHKKEDGIWSTDILKDQKEPKNKTFLRCEAKNYSGRFTCWWLTTISTDLTFSVKSSRGSSDPQGVTCGAATLSAERVRGDNKEYEYSVECQEDSACPAAEESLPIEVMVDAVHKLKYENYTSSFFIRDIIKPDPPKNLQLKPLKNSRQVEVSWEYPDTWSTPHSYFSLTFCVQVQGKSKREKKDRVFTDKTSATVICRKNASISVRAQDRCYSSSWSEWASVPCSEPKSSDKTHTCPPCPAPEAEGAPSVFLFPPKPKDTLMISRTPEVTCVVVDVSHEDPEVKFNWYVDGVEVHNAKTKPREEQYNSTYRVVSVLTVLHQDWLNGKEYKCKVSNKALPSSIEKTISKAKGQPREPQVCTLPPSRDELTENQVSLTCLVKGFYPSDIAVEWESNGQPENNYKTTPPVLDSDGSFFLYSWLTVDKSRWQQGNVFSCSVMHEALHNHYTQKSLSLSPG

SEQ ID NO: 194 - protein, 443 aa, Artificial Sequence
  Description of Artificial Sequence: Synthetic polypeptide
RNLPVATPDPGMFPCLHHSQNLLRAVSNMLQKARQTLEFYPCTSEEIDHEDITKDKTSTVEACLPLELTKNESCLNSRETSFITNGSCLASRKTSFMMALCLSSIYEDLKMYQVEFKTMNAKLLMDPKRQIFLDQNMLAVIDELMQALNFNSETVPQKSSLEEPDFYKTKIKLCILLHAFRIRACTIDRVMSYLNASGGGGSGGGGSGGGGSEPKSSDKTHTCPPCPAPEAEGAPSVFLFPPKPKDTLMISRTPEVTCVVVDVSHEDPEVKFNWYVDGVEVHNAKTKPREEQYNSTYRVVSVLTVLHQDWLNGKEYKCKVSNKALPSSIEKTISKAKGQPREPRVYTLPPCRDELTKNQVSLTCLVKGFYPSDIAVEWESNGQPENNYKTTPPVLVSDGSFTLYSKLTVDKSRWQQGNVFSCSVMHEALHNHYTQKSLSLSPG

SEQ ID NO: 195 - protein, 537 aa, Artificial Sequence
  Description of Artificial Sequence: Synthetic polypeptide
IWELKKDVYVVELDWYPDAPGEMVVLTCDTPEEDGITWTLDQSSEVLGSGKTLTIQVKEFGDAGQYTCHKGGEVLSHSLLLLHKKEDGIWSTDILKDQKEPKNKTFLRCEAKNYSGRFTCWWLTTISTDLTFSVKSSRGSSDPQGVTCGAATLSAERVRGDNKEYEYSVECQEDSACPAAEESLPIEVMVDAVHKLKYENYTSSFFIRDIIKPDPPKNLQLKPLKNSRQVEVSWEYPDTWSTPHSYFSLTFCVQVQGKSKREKKDRVFTDKTSATVICRKNASISVRAQDRCYSSSWSEWASVPCSEPKSSDKTHTCPPCPAPEAAGGPSVFLFPPKPKDTLMISRTPEVTCVVVDVSHEDPEVKFNWYVDGVEVHNAKTKPREEQYNSTYRVVSVLTVLHQDWLNGKEYKCKVSNKALPAPIEKTISKAKGQPREPQVCTLPPSRDELTENQVSLTCLVKGFYPSDIAVEWESNGQPENNYKTTPPVLDSDGSFFLYSWLTVDKSRWQQGNVFSCSVMHEALHNHYTQKSLSLSPG

SEQ ID NO: 196 - protein, 443 aa, Artificial Sequence; identical to SEQ ID NO: 190
  Description of Artificial Sequence: Synthetic polypeptide

SEQ ID NO: 197 - protein, 537 aa, Artificial Sequence; identical to SEQ ID NO: 191
  Description of Artificial Sequence: Synthetic polypeptide

SEQ ID NO: 198 - protein, 443 aa, Artificial Sequence; identical to SEQ ID NO: 192
  Description of Artificial Sequence: Synthetic polypeptide

SEQ ID NO: 199 - protein, 537 aa, Artificial Sequence; identical to SEQ ID NO: 193
  Description of Artificial Sequence: Synthetic polypeptide

SEQ ID NO: 200 - protein, 443 aa, Artificial Sequence; identical to SEQ ID NO: 194
  Description of Artificial Sequence: Synthetic polypeptide

SEQ ID NO: 201 - protein, 306 aa, Artificial Sequence
  Description of Artificial Sequence: Synthetic polypeptide
IWELKKDVYVVELDWYPDAPGEMVVLTCDTPEEDGITWTLDQSSEVLGSGKTLTIQVKEFGDAGQYTCHKGGEVLSHSLLLLHKKEDGIWSTDILKDQKEPKNKTFLRCEAKNYSGRFTCWWLTTISTDLTFSVKSSRGSSDPQGVTCGAATLSAERVRGDNKEYEYSVECQEDSASPAAEESLPIEVMVDAVHKLKYENYTSSFFIRDIIKPDPPKNLQLKPLKNSRQVEVSWEYPDTWSTPHSYFSLTFCVQVQGKSKREKKDRVFTDKTSATVICRKNASISVRAQDRCYSSSWSEWASVPCS

SEQ ID NO: 202 - protein, 197 aa, Artificial Sequence
  Description of Artificial Sequence: Synthetic polypeptide
RNLPVATPDPGMFPCLHHSQNLLRAVSNMLQKARQTLEFYPCTSEEIDHEDITKDKTSTVEACLPLELTKNESSLNSRETSFITNGSCLASRKTSFMMALCLSSIYEDLKMYQVEFKTMNAKLLMDPKRQIFLDQNMLAVIDELMQALNFNSETVPQKSSLEEPDFYKTKIKLCILLHAFRIRACTIDRVMSYLNAS

SEQ ID NO: 203 - protein, 306 aa, Artificial Sequence
  Description of Artificial Sequence: Synthetic polypeptide
IWELKKDVYVVELDWYPDAPGEMVVLTCDTPEEDGITWTLDQSSEVLGSGKTLTIQVKEFGDAGQYTCHKGGEVLSHSLLLLHKKEDGIWSTDILKDQKEPKNKTFLRCEAKNYSGRFTCWWLTTISTDLTFSVKSSRGSSDPQGVTCGAATLSAERVRGDNKEYEYSVECQEDSACPAAEESLPIEVMVDAVHKLKYENYTSSFFIRDIIKPDPPKNLQLKPLKNSRQVEVSWEYPDTWSTPHSYFSLTFCVQVQGKSKREKKDRVFTDKTSATVICRKNASISVRAQDRCYSSSWSEWASVPCS

SEQ ID NO: 204 - protein, 197 aa, Artificial Sequence
  Description of Artificial Sequence: Synthetic polypeptide
RNLPVATPDPGMFPCLHHSQNLLRAVSNMLQKARQTLEFYPCTSEEIDHEDITKDKTSTVEACLPLELTKNESCLNSRETSFITNGSCLASRKTSFMMALCLSSIYEDLKMYQVEFKTMNAKLLMDPKRQIFLDQNMLAVIDELMQALNFNSETVPQKSSLEEPDFYKTKIKLCILLHAFRIRACTIDRVMSYLNAS

SEQ ID NO: 205 - protein, 208 aa, Unknown
  Description of Unknown: IgG4 Fc wild-type sequence
PSVFLFPPKPKDTLMISRTPEVTCVVVDVSQEDPEVQFNWYVDGVEVHNAKTKPREEQFNSTYRVVSVLTVLHQDWLNGKEYKCKVSNKGLPSSIEKTISKAKGQPREPQVYTLPPSQEEMTKNQVSLTCVKGFYPSDIAVEWESNGQPENNYKTTPPVLDSDGSFFLYSKLTVDKSRWQEGNVFSCSVMHEALHNHYTQKSLSLSLG

SEQ ID NO: 206 - protein, 208 aa, Artificial Sequence
  Description of Artificial Sequence: Synthetic polypeptide
PSVFLFPPKPKDTLMISRTPEVTCVVVDVSQEDPEVQFNWYVDGVEVHNAKTKPREEQFNSTYRVVSVLTVLHQDWLNGKEYKCKVSNKGLPSSIEKTISKAKGQPREPQVCTLPPSQEEMTKNQVSLTCVEGFYPSDIAVEWESNGQPENNYKTTPPVLDSDGSFFLYSWLTVDKSRWQEGNVFSCSVMHEALHNHYTQKSLSLSLG

SEQ ID NO: 207 - protein, 209 aa, Artificial Sequence
  Description of Artificial Sequence: Synthetic polypeptide
PSVFLFPPKPKDTLMISRTPEVTCVVVDVSQEDPEVQFNWYVDGVEVHNAKTKPREEQFNSTYRVVSVLTVLHQDWLNGKEYKCKVSNKGLPSSIEKTISKAKGQPREPQVYTLPPCQENMTKNQVSLTCLVKGFYPSDIAVEWESNGQPENNYKTTPPVLVSDGSFTLYSRLTVDKSRWQEGNVFSCSVMHEALHNHYTQKSLSLSLG

SEQ ID NO: 208 - protein, 209 aa, Artificial Sequence
  Description of Artificial Sequence: Synthetic polypeptide
PSVFLFPPKPKDTLMISRTPEVTCVVVDVSQEDPEVQFNWYVDGVEVHNAKTKPREEQFNSTYRVVSVLTVLHQDWLNGKEYKCKVSNKGLPSSIEKTISKAKGQPREPQVCTLPPSQEEMTENQVSLTCLVKGFYPSDIAVEWESNGQPENNYKTTPPVLDSDGSFFLYSWLTVDKSRWQEGNVFSCSVMHEALHNHYTQKSLSLSLG

SEQ ID NO: 209 - protein, 209 aa, Artificial Sequence
  Description of Artificial Sequence: Synthetic polypeptide
PSVFLFPPKPKDTLMISRTPEVTCVVVDVSQEDPEVQFNWYVDGVEVHNAKTKPREEQFNSTYRVVSVLTVLHQDWLNGKEYKCKVSNKGLPSSIEKTISKAKGQPREPRVYTLPPCQEEMTKNQVSLTCLVKGFYPSDIAVEWESNGQPENNYKTTPPVLVSDGSFTLYSRLTVDKSRWQEGNVFSCSVMHEALHNHYTQKSLSLSLG

SEQ ID NO: 210 - protein, 209 aa, Artificial Sequence
  Description of Artificial Sequence: Synthetic polypeptide
PSVFLFPPKPKDTLMISRTPEVTCVVVDVSQEDPEVQFNWYVDGVEVHNAKTKPREEQFNSTYRVVSVLTVLHQDWLNGKEYKCKVSNKGLASSIEKTISKAKGQPREPQVCTLPPSQEEMTENQVSLTCLVKGFYPSDIAVEWESNGQPENNYKTTPPVLDSDGSFFLYSWLTVDKSRWQEGNVFSCSVMHEALHNHYTQKSLSLSLG

SEQ ID NO: 211 - protein, 209 aa, Artificial Sequence
  Description of Artificial Sequence: Synthetic polypeptide
PSVFLFPPKPKDTLMISRTPEVTCVVVDVSQEDPEVQFNWYVDGVEVHNAKTKPREEQFNSTYRVVSVLTVLHQDWLNGKEYKCKVSNKGLASSIEKTISKAKGQPREPRVYTLPPCQEEMTKNQVSLTCLVKGFYPSDIAVEWESNGQPENNYKTTPPVLVSDGSFTLYSRLTVDKSRWQEGNVFSCSVMHEALHNHYTQKSLSLSLG

SEQ ID NO: 212 - protein, 209 aa, Unknown
  Description of Unknown: IgG1 Fc wild-type sequence
PSVFLFPPKPKDTLMISRTPEVTCVVVDVSHEDPEVKFNWYVDGVEVHNAKTKPREEQYNSTYRVVSVLTVLHQDWLNGKEYKCKVSNKALPAPIEKTISKAKGQPREPQVYTLPPSRDELTKNQVSLTCLVKGFYPSDIAVEWESNGQPENNYKTTPPVLDSDGSFFLYSKLTVDKSRWQQGNVFSCSVMHEALHNHYTQKSLSLSPG

SEQ ID NO: 213 - protein, 209 aa, Artificial Sequence
  Description of Artificial Sequence: Synthetic polypeptide
PSVFLFPPKPKDTLMISRTPEVTCVVVDVSHEDPEVKFNWYVDGVEVHNAKTKPREEQYNSTYRVVSVLTVLHQDWLNGKEYKCKVSNKALPAPIEKTISKAKGQPREPQVCTLPPSRDELTENQVSLTCLVKGFYPSDIAVEWESNGQPENNYKTTPPVLDSDGSFFLYSWLTVDKSRWQQGNVFSCSVMHEALHNHYTQKSLSLSPG

SEQ ID NO: 214 - protein, 209 aa, Artificial Sequence
  Description of Artificial Sequence: Synthetic polypeptide
PSVFLFPPKPKDTLMISRTPEVTCVVVDVSHEDPEVKFNWYVDGVEVHNAKTKPREEQYNSTYRVVSVLTVLHQDWLNGKEYKCKVSNKALPAPIEKTISKAKGQPREPRVYTLPPCRDELTKNQVSLTCLVKGFYPSDIAVEWESNGQPENNYKTTPPVLVSDGSFTLYSKLTVDKSRWQQGNVFSCSVMHEALHNHYTQKSLSLSPG

SEQ ID NO: 215 - protein, 209 aa, Artificial Sequence
  Description of Artificial Sequence: Synthetic polypeptide
PSVFLFPPKPKDTLMISRTPEVTCVVVDVSHEDPEVKFNWYVDGVEVHNAKTKPREEQYNSTYRVVSVLTVLHQDWLNGKEYKCKVSNKALAAPIEKTISKAKGQPREPQVCTLPPSRDELTENQVSLTCLVKGFYPSDIAVEWESNGQPENNYKTTPPVLDSDGSFFLYSWLTVDKSRWQQGNVFSCSVMHEALHNHYTQKSLSLSPG

SEQ ID NO: 216 - protein, 209 aa, Artificial Sequence
  Description of Artificial Sequence: Synthetic polypeptide
PSVFLFPPKPKDTLMISRTPEVTCVVVDVSHEDPEVKFNWYVDGVEVHNAKTKPREEQYNSTYRVVSVLTVLHQDWLNGKEYKCKVSNKALAAPIEKTISKAKGQPREPRVYTLPPCRDELTKNQVSLTCLVKGFYPSDIAVEWESNGQPENNYKTTPPVLVSDGSFTLYSKLTVDKSRWQQGNVFSCSVMHEALHNHYTQKSLSLSPG

SEQ ID NO: 217 - protein, 209 aa, Artificial Sequence
  Description of Artificial Sequence: Synthetic polypeptide
PSVFLFPPKPKDTLMISRTPEVTCVVVDVSHEDPEVKFNWYVDGVEVHNAKTKPREEQYNSTYRVVSVLTVLHQDWLNGKEYKCKVSNKALPSSIEKTISKAKGQPREPQVCTLPPSRDELTENQVSLTCLVKGFYPSDIAVEWESNGQPENNYKTTPPVLDSDGSFFLYSWLTVDKSRWQQGNVFSCSVMHEALHNHYTQKSLSLSPG

SEQ ID NO: 218 - protein, 209 aa, Artificial Sequence
  Description of Artificial Sequence: Synthetic polypeptide
PSVFLFPPKPKDTLMISRTPEVTCVVVDVSHEDPEVKFNWYVDGVEVHNAKTKPREEQYNSTYRVVSVLTVLHQDWLNGKEYKCKVSNKALPSSIEKTISKAKGQPREPRVYTLPPCRDELTKNQVSLTCLVKGFYPSDIAVEWESNGQPENNYKTTPPVLVSDGSFTLYSKLTVDKSRWQQGNVFSCSVMHEALHNHYTQKSLSLSPG

SEQ ID NO: 219 - protein, 230 aa, Artificial Sequence
  Description of Artificial Sequence: Synthetic polypeptide
RVESKYGPPCPPCPAPEFLGGPSVFLFPPKPKDTLMISRTPEVTCVVVDVSQEDPEVQFNWYVDGVEVHNAKTKPREEQFNSTYRVVSVLTVLHQDWLNGKEYKCKVSNKGLPSSIEKTISKAKGQPREPQVYTLPPSQEEMTKNQVSLTCLVKGFYPSDIAVEWESNGQPENNYKTTPPVLDSDGSFFLYSKLTVDKSRWQEGNVFSCSVMHEALHNHYTQKSLSLSLG

SEQ ID NO: 220 - protein, 230 aa, Artificial Sequence
  Description of Artificial Sequence: Synthetic polypeptide
RVESKYGPPCPPCPAPEFLGGPSVFLFPPKPKDTLMISRTPEVTCVVVDVSQEDPEVQFNWYVDGVEVHNAKTKPREEQFNSTYRVVSVLTVLHQDWLNGKEYKCKVSNKGLPSSIEKTISKAKGQPREPQVCTLPPSQEEMTKNQVSLTCLVEGFYPSDIAVEWESNGQPENNYKTTPPVLDSDGSFFLYSWLTVDKSRWQEGNVFSCSVMHEALHNHYTQKSLSLSLG

SEQ ID NO: 221 - protein, 230 aa, Artificial Sequence
  Description of Artificial Sequence: Synthetic polypeptide
RVESKYGPPCPPCPAPEFLGGPSVFLFPPKPKDTLMISRTPEVTCVVVDVSQEDPEVQFNWYVDGVEVHNAKTKPREEQFNSTYRVVSVLTVLHQDWLNGKEYKCKVSNKGLPSSIEKTISKAKGQPREPQVYTLPPCQENMTKNQVSLTCLVKGFYPSDIAVEWESNGQPENNYKTTPPVLVSDGSFTLYSRLTVDKSRWQEGNVFSCSVMHEALHNHYTQKSLSLSLG

SEQ ID NO: 222 - protein, 230 aa, Artificial Sequence
  Description of Artificial Sequence: Synthetic polypeptide
RVESKYGPPCPPCPAPEFLGGPSVFLFPPKPKDTLMISRTPEVTCVVVDVSQEDPEVQFNWYVDGVEVHNAKTKPREEQFNSTYRVVSVLTVLHQDWLNGKEYKCKVSNKGLPSSIEKTISKAKGQPREPQVCTLPPSQEEMTENQVSLTCLVKGFYPSDIAVEWESNGQPENNYKTTPPVLDSDGSFFLYSWLTVDKSRWQEGNVFSCSVMHEALHNHYTQKSLSLSLG

SEQ ID NO: 223 - protein, 230 aa, Artificial Sequence
  Description of Artificial Sequence: Synthetic polypeptide
RVESKYGPPCPPCPAPEFLGGPSVFLFPPKPKDTLMISRTPEVTCVVVDVSQEDPEVQFNWYVDGVEVHNAKTKPREEQFNSTYRVVSVLTVLHQDWLNGKEYKCKVSNKGLPSSIEKTISKAKGQPREPRVYTLPPCQEEMTKNQVSLTCLVKGFYPSDIAVEWESNGQPENNYKTTPPVLVSDGSFTLYSRLTVDKSRWQEGNVFSCSVMHEALHNHYTQKSLSLSLG

SEQ ID NO: 224 - protein, 230 aa, Artificial Sequence
  Description of Artificial Sequence: Synthetic polypeptide
RVESKYGPPCPPCPAPEFEGGPSVFLFPPKPKDTLMISRTPEVTCVVVDVSQEDPEVQFNWYVDGVEVHNAKTKPREEQFNSTYRVVSVLTVLHQDWLNGKEYKCKVSNKGLPSSIEKTISKAKGQPREPQVCTLPPSQEEMTENQVSLTCLVKGFYPSDIAVEWESNGQPENNYKTTPPVLDSDGSFFLYSWLTVDKSRWQEGNVFSCSVMHEALHNHYTQKSLSLSLG

SEQ ID NO: 225 - protein, 230 aa, Artificial Sequence
  Description of Artificial Sequence: Synthetic polypeptide
RVESKYGPPCPPCPAPEFEGGPSVFLFPPKPKDTLMISRTPEVTCVVVDVSQEDPEVQFNWYVDGVEVHNAKTKPREEQFNSTYRVVSVLTVLHQDWLNGKEYKCKVSNKGLPSSIEKTISKAKGQPREPRVYTLPPCQEEMTKNQVSLTCLVKGFYPSDIAVEWESNGQPENNYKTTPPVLVSDGSFTLYSRLTVDKSRWQEGNVFSCSVMHEALHNHYTQKSLSLSLG

SEQ ID NO: 226 - protein, 230 aa, Artificial Sequence
  Description of Artificial Sequence: Synthetic polypeptide
RVESKYGPPCPPCPAPEFEGGPSVFLFPPKPKDTLMISRTPEVTCVVVDVSQEDPEVQFNWYVDGVEVHNAKTKPREEQFNSTYRVVSVLTVLHQDWLNGKEYKCKVSNKGLASSIEKTISKAKGQPREPQVCTLPPSQEEMTENQVSLTCLVKGFYPSDIAVEWESNGQPENNYKTTPPVLDSDGSFFLYSWLTVDKSRWQEGNVFSCSVMHEALHNHYTQKSLSLSLG

SEQ ID NO: 227 - protein, 230 aa, Artificial Sequence
  Description of Artificial Sequence: Synthetic polypeptide
RVESKYGPPCPPCPAPEFEGGPSVFLFPPKPKDTLMISRTPEVTCVVVDVSQEDPEVQFNWYVDGVEVHNAKTKPREEQFNSTYRVVSVLTVLHQDWLNGKEYKCKVSNKGLASSIEKTISKAKGQPREPRVYTLPPCQEEMTKNQVSLTCLVKGFYPSDIAVEWESNGQPENNYKTTPPVLVSDGSFTLYSRLTVDKSRWQEGNVFSCSVMHEALHNHYTQKSLSLSLG

SEQ ID NO: 228 - protein, 231 aa, Artificial Sequence
  Description of Artificial Sequence: Synthetic polypeptide
EPKSSDKTHTCPPCPAPELLGGPSVFLFPPKPKDTLMISRTPEVTCVVVDVSHEDPEVKFNWYVDGVEVHNAKTKPREEQYNSTYRVVSVLTVLHQDWLNGKEYKCKVSNKALPAPIEKTISKAKGQPREPQVYTLPPSRDELTKNQVSLTCLVKGFYPSDIAVEWESNGQPENNYKTTPPVLDSDGSFFLYSKLTVDKSRWQQGNVFSCSVMHEALHNHYTQKSLSLSPG

SEQ ID NO: 229 - protein, 231 aa, Artificial Sequence
  Description of Artificial Sequence: Synthetic polypeptide
EPKSSDKTHTCPPCPAPELLGGPSVFLFPPKPKDTLMISRTPEVTCVVVDVSHEDPEVKFNWYVDGVEVHNAKTKPREEQYNSTYRVVSVLTVLHQDWLNGKEYKCKVSNKALPAPIEKTISKAKGQPREPQVCTLPPSRDELTENQVSLTCLVKGFYPSDIAVEWESNGQPENNYKTTPPVLDSDGSFFLYSWLTVDKSRWQQGNVFSCSVMHEALHNHYTQKSLSLSPG

SEQ ID NO: 230 - protein, 231 aa, Artificial Sequence
  Description of Artificial Sequence: Synthetic polypeptide
EPKSSDKTHTCPPCPAPELLGGPSVFLFPPKPKDTLMISRTPEVTCVVVDVSHEDPEVKFNWYVDGVEVHNAKTKPREEQYNSTYRVVSVLTVLHQDWLNGKEYKCKVSNKALPAPIEKTISKAKGQPREPRVYTLPPCRDELTKNQVSLTCLVKGFYPSDIAVEWESNGQPENNYKTTPPVLVSDGSFTLYSKLTVDKSRWQQGNVFSCSVMHEALHNHYTQKSLSLSPG

SEQ ID NO: 231 - protein, 231 aa, Artificial Sequence
  Description of Artificial Sequence: Synthetic polypeptide
EPKSSDKTHTCPPCPAPEAAGGPSVFLFPPKPKDTLMISRTPEVTCVVVDVSHEDPEVKFNWYVDGVEVHNAKTKPREEQYNSTYRVVSVLTVLHQDWLNGKEYKCKVSNKALPAPIEKTISKAKGQPREPQVCTLPPSRDELTENQVSLTCLVKGFYPSDIAVEWESNGQPENNYKTTPPVLDSDGSFFLYSWLTVDKSRWQQGNVFSCSVMHEALHNHYTQKSLSLSPG

SEQ ID NO: 232 - protein, 231 aa, Artificial Sequence
  Description of Artificial Sequence: Synthetic polypeptide
EPKSSDKTHTCPPCPAPEAAGGPSVFLFPPKPKDTLMISRTPEVTCVVVDVSHEDPEVKFNWYVDGVEVHNAKTKPREEQYNSTYRVVSVLTVLHQDWLNGKEYKCKVSNKALPAPIEKTISKAKGQPREPRVYTLPPCRDELTKNQVSLTCLVKGFYPSDIAVEWESNGQPENNYKTTPPVLVSDGSFTLYSKLTVDKSRWQQGNVFSCSVMHEALHNHYTQKSLSLSPG

SEQ ID NO: 233 - protein, 231 aa, Artificial Sequence
  Description of Artificial Sequence: Synthetic polypeptide
EPKSSDKTHTCPPCPAPEAAGGPSVFLFPPKPKDTLMISRTPEVTCVVVDVSHEDPEVKFNWYVDGVEVHNAKTKPREEQYNSTYRVVSVLTVLHQDWLNGKEYKCKVSNKALAAPIEKTISKAKGQPREPQVCTLPPSRDELTENQVSLTCLVKGFYPSDIAVEWESNGQPENNYKTTPPVLDSDGSFFLYSWLTVDKSRWQQGNVFSCSVMHEALHNHYTQKSLSLSPG

SEQ ID NO: 234 - protein, 231 aa, Artificial Sequence
  Description of Artificial Sequence: Synthetic polypeptide
EPKSSDKTHTCPPCPAPEAAGGPSVFLFPPKPKDTLMISRTPEVTCVVVDVSHEDPEVKFNWYVDGVEVHNAKTKPREEQYNSTYRVVSVLTVLHQDWLNGKEYKCKVSNKALAAPIEKTISKAKGQPREPRVYTLPPCRDELTKNQVSLTCLVKGFYPSDIAVEWESNGQPENNYKTTPPVLVSDGSFTLYSKLTVDKSRWQQGNVFSCSVMHEALHNHYTQKSLSLSPG

SEQ ID NO: 235 - protein, 231 aa, Artificial Sequence
  Description of Artificial Sequence: Synthetic polypeptide
EPKSSDKTHTCPPCPAPEAEGAPSVFLFPPKPKDTLMISRTPEVTCVVVDVSHEDPEVKFNWYVDGVEVHNAKTKPREEQYNSTYRVVSVLTVLHQDWLNGKEYKCKVSNKALPSSIEKTISKAKGQPREPQVCTLPPSRDELTENQVSLTCLVKGFYPSDIAVEWESNGQPENNYKTTPPVLDSDGSFFLYSWLTVDKSRWQQGNVFSCSVMHEALHNHYTQKSLSLSPG

SEQ ID NO: 236 - protein, 231 aa, Artificial Sequence
  Description of Artificial Sequence: Synthetic polypeptide
EPKSSDKTHTCPPCPAPEAEGAPSVFLFPPKPKDTLMISRTPEVTCVVVDVSHEDPEVKFNWYVDGVEVHNAKTKPREEQYNSTYRVVSVLTVLHQDWLNGKEYKCKVSNKALPSSIEKTISKAKGQPREPRVYTLPPCRDELTKNQVSLTCLVKGFYPSDIAVEWESNGQPENNYKTTPPVLVSDGSFTLYSKLTVDKSRWQQGNVFSCSVMHEALHNHYTQKSLSLSPG

SEQ ID NO: 237 - protein, 21 aa, Artificial Sequence
  Description of Artificial Sequence: Synthetic peptide
  MOD_RES (18)..(18): Leu or Ala
  MOD_RES (19)..(19): Leu, Glu or Ala
  MOD_RES (21)..(21): Ala or Gly
PKSSDKTHTCPPCPAPEXXGX

SEQ ID NO: 238 - protein, 21 aa, Artificial Sequence
  Description of Artificial Sequence: Synthetic peptide
PKSSDKTHTCPPCPAPELLGG

SEQ ID NO: 239 - protein, 21 aa, Artificial Sequence
  Description of Artificial Sequence: Synthetic peptide
PKSSDKTHTCPPCPAPEAAGG

SEQ ID NO: 240 - protein, 21 aa, Artificial Sequence
  Description of Artificial Sequence: Synthetic peptide
PKSSDKTHTCPPCPAPEAEGA

SEQ ID NO: 241 - protein, 36 aa, Artificial Sequence
  Description of Artificial Sequence: Synthetic polypeptide
GGGGSGGGGSGGGGSPKSSDKTHTCPPCPAPELLGG

SEQ ID NO: 242 - protein, 26 aa, Artificial Sequence
  Description of Artificial Sequence: Synthetic peptide
GGGGSPKSSDKTHTCPPCPAPELLGG

SEQ ID NO: 243 - protein, 31 aa, Artificial Sequence
  Description of Artificial Sequence: Synthetic polypeptide
GGGGSGGGGSPKSSDKTHTCPPCPAPELLGG

SEQ ID NO: 244 - protein, 36 aa, Artificial Sequence
  Description of Artificial Sequence: Synthetic polypeptide
GGGGSGGGGSGGGGSPKSSDKTHTCPPCPAPEAAGG

SEQ ID NO: 245 - protein, 26 aa, Artificial Sequence
  Description of Artificial Sequence: Synthetic peptide
GGGGSPKSSDKTHTCPPCPAPEAAGG

SEQ ID NO: 246 - protein, 31 aa, Artificial Sequence
  Description of Artificial Sequence: Synthetic polypeptide
GGGGSGGGGSPKSSDKTHTCPPCPAPEAAGG

SEQ ID NO: 247 - protein, 36 aa, Artificial Sequence
  Description of Artificial Sequence: Synthetic polypeptide
GGGGSGGGGSGGGGSPKSSDKTHTCPPCPAPEAEGA

SEQ ID NO: 248 - protein, 26 aa, Artificial Sequence
  Description of Artificial Sequence: Synthetic peptide
GGGGSPKSSDKTHTCPPCPAPEAEGA

SEQ ID NO: 249 - protein, 31 aa, Artificial Sequence
  Description of Artificial Sequence: Synthetic polypeptide
GGGGSGGGGSPKSSDKTHTCPPCPAPEAEGA

SEQ ID NO: 250 - protein, 230 aa, Artificial Sequence
  Description of Artificial Sequence: Synthetic polypeptide
PKSSDKTHTCPPCPAPELLGGPSVFLFPPKPKDTLMISRTPEVTCVVVDVSHEDPEVKFNWYVDGVEVHNAKTKPREEQYNSTYRVVSVLTVLHQDWLNGKEYKCKVSNKALPAPIEKTISKAKGQPREPQVYTLPPSRDELTKNQVSLTCLVKGFYPSDIAVEWESNGQPENNYKTTPPVLDSDGSFFLYSKLTVDKSRWQQGNVFSCSVMHEALHNHYTQKSLSLSPG

SEQ ID NO: 251 - protein, 230 aa, Artificial Sequence
  Description of Artificial Sequence: Synthetic polypeptide
PKSSDKTHTCPPCPAPELLGGPSVFLFPPKPKDTLMISRTPEVTCVVVDVSHEDPEVKFNWYVDGVEVHNAKTKPREEQYNSTYRVVSVLTVLHQDWLNGKEYKCKVSNKALPAPIEKTISKAKGQPREPQVCTLPPSRDELTENQVSLTCLVKGFYPSDIAVEWESNGQPENNYKTTPPVLDSDGSFFLYSWLTVDKSRWQQGNVFSCSVMHEALHNHYTQKSLSLSPG

SEQ ID NO: 252 - protein, 230 aa, Artificial Sequence
  Description of Artificial Sequence: Synthetic polypeptide
PKSSDKTHTCPPCPAPELLGGPSVFLFPPKPKDTLMISRTPEVTCVVVDVSHEDPEVKFNWYVDGVEVHNAKTKPREEQYNSTYRVVSVLTVLHQDWLNGKEYKCKVSNKALPAPIEKTISKAKGQPREPRVYTLPPCRDELTKNQVSLTCLVKGFYPSDIAVEWESNGQPENNYKTTPPVLVSDGSFTLYSKLTVDKSRWQQGNVFSCSVMHEALHNHYTQKSLSLSPG

SEQ ID NO: 253 - protein, 230 aa, Artificial Sequence
  Description of Artificial Sequence: Synthetic polypeptide
PKSSDKTHTCPPCPAPEAAGGPSVFLFPPKPKDTLMISRTPEVTCVVVDVSHEDPEVKFNWYVDGVEVHNAKTKPREEQYNSTYRVVSVLTVLHQDWLNGKEYKCKVSNKALPAPIEKTISKAKGQPREPQVCTLPPSRDELTENQVSLTCLVKGFYPSDIAVEWESNGQPENNYKTTPPVLDSDGSFFLYSWLTVDKSRWQQGNVFSCSVMHEALHNHYTQKSLSLSPG

SEQ ID NO: 254 - protein, 230 aa, Artificial Sequence
  Description of Artificial Sequence: Synthetic polypeptide
PKSSDKTHTCPPCPAPEAAGGPSVFLFPPKPKDTLMISRTPEVTCVVVDVSHEDPEVKFNWYVDGVEVHNAKTKPREEQYNSTYRVVSVLTVLHQDWLNGKEYKCKVSNKALPAPIEKTISKAKGQPREPRVYTLPPCRDELTKNQVSLTCLVKGFYPSDIAVEWESNGQPENNYKTTPPVLVSDGSFTLYSKLTVDKSRWQQGNVFSCSVMHEALHNHYTQKSLSLSPG

SEQ ID NO: 255 - protein, 230 aa, Artificial Sequence
  Description of Artificial Sequence: Synthetic polypeptide
PKSSDKTHTCPPCPAPEAAGGPSVFLFPPKPKDTLMISRTPEVTCVVVDVSHEDPEVKFNWYVDGVEVHNAKTKPREEQYNSTYRVVSVLTVLHQDWLNGKEYKCKVSNKALAAPIEKTISKAKGQPREPQVCTLPPSRDELTENQVSLTCLVKGFYPSDIAVEWESNGQPENNYKTTPPVLDSDGSFFLYSWLTVDKSRWQQGNVFSCSVMHEALHNHYTQKSLSLSPG

SEQ ID NO: 256 - protein, 230 aa, Artificial Sequence
  Description of Artificial Sequence: Synthetic polypeptide
PKSSDKTHTCPPCPAPEAAGGPSVFLFPPKPKDTLMISRTPEVTCVVVDVSHEDPEVKFNWYVDGVEVHNAKTKPREEQYNSTYRVVSVLTVLHQDWLNGKEYKCKVSNKALAAPIEKTISKAKGQPREPRVYTLPPCRDELTKNQVSLTCLVKGFYPSDIAVEWESNGQPENNYKTTPPVLVSDGSFTLYSKLTVDKSRWQQGNVFSCSVMHEALHNHYTQKSLSLSPG

SEQ ID NO: 257 - protein, 230 aa, Artificial Sequence
  Description of Artificial Sequence: Synthetic polypeptide
PKSSDKTHTCPPCPAPEAEGAPSVFLFPPKPKDTLMISRTPEVTCVVVDVSHEDPEVKFNWYVDGVEVHNAKTKPREEQYNSTYRVVSVLTVLHQDWLNGKEYKCKVSNKALPSSIEKTISKAKGQPREPQVCTLPPSRDELTENQVSLTCLVKGFYPSDIAVEWESNGQPENNYKTTPPVLDSDGSFFLYSWLTVDKSRWQQGNVFSCSVMHEALHNHYTQKSLSLSPG

SEQ ID NO: 258 - protein, 230 aa, Artificial Sequence
  Description of Artificial Sequence: Synthetic polypeptide
PKSSDKTHTCPPCPAPEAEGAPSVFLFPPKPKDTLMISRTPEVTCVVVDVSHEDPEVKFNWYVDGVEVHNAKTKPREEQYNSTYRVVSVLTVLHQDWLNGKEYKCKVSNKALPSSIEKTISKAKGQPREPRVYTLPPCRDELTKNQVSLTCLVKGFYPSDIAVEWESNGQPENNYKTTPPVLVSDGSFTLYSKLTVDKSRWQQGNVFSCSVMHEALHNHYTQKSLSLSPG

SEQ ID NO: 259 - protein, 536 aa, Artificial Sequence
  Description of Artificial Sequence: Synthetic polypeptide
IWELKKDVYVVELDWYPDAPGEMVVLTCDTPEEDGITWTLDQSSEVLGSGKTLTIQVKEFGDAGQYTCHKGGEVLSHSLLLLHKKEDGIWSTDILKDQKEPKNKTFLRCEAKNYSGRFTCWWLTTISTDLTFSVKSSRGSSDPQGVTCGAATLSAERVRGDNKEYEYSVECQEDSACPAAEESLPIEVMVDAVHKLKYENYTSSFFIRDIIKPDPPKNLQLKPLKNSRQVEVSWEYPDTWSTPHSYFSLTFCVQVQGKSKREKKDRVFTDKTSATVICRKNASISVRAQDRYYSSSWSEWASVPCSPKSSDKTHTCPPCPAPELLGGPSVFLFPPKPKDTLMISRTPEVTCVVVDVSHEDPEVKFNWYVDGVEVHNAKTKPREEQYNSTYRVVSVLTVLHQDWLNGKEYKCKVSNKALPAPIEKTISKAKGQPREPQVCTLPPSRDELTENQVSLTCLVKGFYPSDIAVEWESNGQPENNYKTTPPVLDSDGSFFLYSWLTVDKSRWQQGNVFSCSVMHEALHNHYTQKSLSLSPG

SEQ ID NO: 260 - protein, 536 aa, Artificial Sequence
  Description of Artificial Sequence: Synthetic polypeptide
IWELKKDVYVVELDWYPDAPGEMVVLTCDTPEEDGITWTLDQSSEVLGSGKTLTIQVKEFGDAGQYTCHKGGEVLSHSLLLLHKKEDGIWSTDILKDQKEPKNKTFLRCEAKNYSGRFTCWWLTTISTDLTFSVKSSRGSSDPQGVTCGAATLSAERVRGDNKEYEYSVECQEDSACPAAEESLPIEVMVDAVHKLKYENYTSSFFIRDIIKPDPPKNLQLKPLKNSRQVEVSWEYPDTWSTPHSYFSLTFCVQVQGKSKREKKDRVFTDKTSATVICRKNASISVRAQDRYYSSSWSEWASVPCSPKSSDKTHTCPPCPAPEAAGGPSVFLFPPKPKDTLMISRTPEVTCVVVDVSHEDPEVKFNWYVDGVEVHNAKTKPREEQYNSTYRVVSVLTVLHQDWLNGKEYKCKVSNKALPAPIEKTISKAKGQPREPQVCTLPPSRDELTENQVSLTCLVKGFYPSDIAVEWESNGQPENNYKTTPPVLDSDGSFFLYSWLTVDKSRWQQGNVFSCSVMHEALHNHYTQKSLSLSPG

SEQ ID NO: 261 - protein, 536 aa, Artificial Sequence
  Description of Artificial Sequence: Synthetic polypeptide
IWELKKDVYVVELDWYPDAPGEMVVLTCDTPEEDGITWTLDQSSEVLGSGKTLTIQVKEFGDAGQYTCHKGGEVLSHSLLLLHKKEDGIWSTDILKDQKEPKNKTFLRCEAKNYSGRFTCWWLTTISTDLTFSVKSSRGSSDPQGVTCGAATLSAERVRGDNKEYEYSVECQEDSACPAAEESLPIEVMVDAVHKLKYENYTSSFFIRDIIKPDPPKNLQLKPLKNSRQVEVSWEYPDTWSTPHSYFSLTFCVQVQGKSKREKKDRVFTDKTSATVICRKNASISVRAQDRYYSSSWSEWASVPCSPKSSDKTHTCPPCPAPEAAGGPSVFLFPPKPKDTLMISRTPEVTCVVVDVSHEDPEVKFNWYVDGVEVHNAKTKPREEQYNSTYRVVSVLTVLHQDWLNGKEYKCKVSNKALAAPIEKTISKAKGQPREPQVCTLPPSRDELTENQVSLTCLVKGFYPSDIAVEWESNGQPENNYKTTPPVLDSDGSFFLYSWLTVDKSRWQQGNVFSCSVMHEALHNHYTQKSLSLSPG

SEQ ID NO: 262 - protein, 536 aa, Artificial Sequence
  Description of Artificial Sequence: Synthetic polypeptide
IWELKKDVYVVELDWYPDAPGEMVVLTCDTPEEDGITWTLDQSSEVLGSGKTLTIQVKEFGDAGQYTCHKGGEVLSHSLLLLHKKEDGIWSTDILKDQKEPKNKTFLRCEAKNYSGRFTCWWLTTISTDLTFSVKSSRGSSDPQGVTCGAATLSAERVRGDNKEYEYSVECQEDSACPAAEESLPIEVMVDAVHKLKYENYTSSFFIRDIIKPDPPKNLQLKPLKNSRQVEVSWEYPDTWSTPHSYFSLTFCVQVQGKSKREKKDRVFTDKTSATVICRKNASISVRAQDRYYSSSWSEWASVPCSPKSSDKTHTCPPCPAPEAEGAPSVFLFPPKPKDTLMISRTPEVTCVVVDVSHEDPEVKFNWYVDGVEVHNAKTKPREEQYNSTYRVVSVLTVLHQDWLNGKEYKCKVSNKALPSSIEKTISKAKGQPREPQVCTLPPSRDELTENQVSLTCLVKGFYPSDIAVEWESNGQPENNYKTTPPVLDSDGSFFLYSWLTVDKSRWQQGNVFSCSVMHEALHNHYTQKSLSLSPG

SEQ ID NO: 263 - protein, 536 aa, Artificial Sequence; identical to SEQ ID NO: 259
  Description of Artificial Sequence: Synthetic polypeptide

SEQ ID NO: 264 - protein, 536 aa, Artificial Sequence; identical to SEQ ID NO: 259
  Description of Artificial Sequence: Synthetic polypeptide

SEQ ID NO: 265 - protein, 536 aa, Artificial Sequence; identical to SEQ ID NO: 259
  Description of Artificial Sequence: Synthetic polypeptide

SEQ ID NO: 266 - protein, 442 aa, Artificial Sequence
  Description of Artificial Sequence: Synthetic polypeptide
RNLPVATPDPGMFPCLHHSQNLLRAVSNMLQKARQTLEFYPCTSEEIDHEDITKDKTSTVEACLPLELTKNESCLNSRETSFITNGSCLASRKTSFMMALCLSSIYEDLKMYQVEFKTMNAKLLMDPKRQIFLDQNMLAVIDELMQALNFNSETVPQKSSLEEPDFYKTKIKLCILLHAFRIRAVTIDRVMSYLNASGGGGSGGGGSGGGGSPKSSDKTHTCPPCPAPELLGGPSVFLFPPKPKDTLMISRTPEVTCVVVDVSHEDPEVKFNWYVDGVEVHNAKTKPREEQYNSTYRVVSVLTVLHQDWLNGKEYKCKVSNKALPAPIEKTISKAKGQPREPQVCTLPPSRDELTENQVSLTCLVKGFYPSDIAVEWESNGQPENNYKTTPPVLDSDGSFFLYSWLTVDKSRWQQGNVFSCSVMHEALHNHYTQKSLSLSPG

SEQ ID NO: 267 - protein, 541 aa, Artificial Sequence
  Description of Artificial Sequence: Synthetic polypeptide
IWELKKDVYVVELDWYPDAPGEMVVLTCDTPEEDGITWTLDQSSEVLGSGKTLTIQVKEFGDAGQYTCHKGGEVLSHSLLLLHKKEDGIWSTDILKDQKEPKNKTFLRCEAKNYSGRFTCWWLTTISTDLTFSVKSSRGSSDPQGVTCGAATLSAERVRGDNKEYEYSVECQEDSACPAAEESLPIEVMVDAVHKLKYENYTSSFFIRDIIKPDPPKNLQLKPLKNSRQVEVSWEYPDTWSTPHSYFSLTFCVQVQGKSKREKKDRVFTDKTSATVICRKNASISVRAQDRYYSSSWSEWASVPCSGGGGSPKSSDKTHTCPPCPAPELLGGPSVFLFPPKPKDTLMISRTPEVTCVVVDVSHEDPEVKFNWYVDGVEVHNAKTKPREEQYNSTYRVVSVLTVLHQDWLNGKEYKCKVSNKALPAPIEKTISKAKGQPREPQVCTLPPSRDELTENQVSLTCLVKGFYPSDIAVEWESNGQPENNYKTTPPVLDSDGSFFLYSWLTVDKSRWQQGNVFSCSVMHEALHNHYTQKSLSLSPG

SEQ ID NO: 268 - protein, 541 aa, Artificial Sequence
  Description of Artificial Sequence: Synthetic polypeptide
IWELKKDVYVVELDWYPDAPGEMVVLTCDTPEEDGITWTLDQSSEVLGSGKTLTIQVKEFGDAGQYTCHKGGEVLSHSLLLLHKKEDGIWSTDILKDQKEPKNKTFLRCEAKNYSGRFTCWWLTTISTDLTFSVKSSRGSSDPQGVTCGAATLSAERVRGDNKEYEYSVECQEDSASPAAEESLPIEVMVDAVHKLKYENYTSSFFIRDIIKPDPPKNLQLKPLKNSRQVEVSWEYPDTWSTPHSYFSLTFCVQVQGKSKREKKDRVFTDKTSATVICRKNASISVRAQDRCYSSSWSEWASVPCSGGGGSPKSSDKTHTCPPCPAPELLGGPSVFLFPPKPKDTLMISRTPEVTCVVVDVSHEDPEVKFNWYVDGVEVHNAKTKPREEQYNSTYRVVSVLTVLHQDWLNGKEYKCKVSNKALPAPIEKTISKAKGQPREPQVCTLPPSRDELTENQVSLTCLVKGFYPSDIAVEWESNGQPENNYKTTPPVLDSDGSFFLYSWLTVDKSRWQQGNVFSCSVMHEALHNHYTQKSLSLSPG

SEQ ID NO: 269 - protein, 536 aa, Artificial Sequence
  Description of Artificial Sequence: Synthetic polypeptide
IWELKKDVYVVELDWYPDAPGEMVVLTCDTPEEDGITWTLDQSSEVLGSGKTLTIQVKEFGDAGQYTCHKGGEVLSHSLLLLHKKEDGIWSTDILKDQKEPKNKTFLRCEAKNYSGRFTCWWLTTISTDLTFSVKSSRGSSDPQGVTCGAATLSAERVRGDNKEYEYSVECQEDSASPAAEESLPIEVMVDAVHKLKYENYTSSFFIRDIIKPDPPKNLQLKPLKNSRQVEVSWEYPDTWSTPHSYFSLTFCVQVQGKSKREKKDRVFTDKTSATVICRKNASISVRAQDRCYSSSWSEWASVPCSPKSSDKTHTCPPCPAPELLGGPSVFLFPPKPKDTLMISRTPEVTCVVVDVSHEDPEVKFNWYVDGVEVHNAKTKPREEQYNSTYRVVSVLTVLHQDWLNGKEYKCKVSNKALPAPIEKTISKAKGQPREPQVCTLPPSRDELTENQVSLTCLVKGFYPSDIAVEWESNGQPENNYKTTPPVLDSDGSFFLYSWLTVDKSRWQQGNVFSCSVMHEALHNHYTQKSLSLSPG

SEQ ID NO: 270 - protein, 536 aa, Artificial Sequence
  Description of Artificial Sequence: Synthetic polypeptide
IWELKKDVYVVELDWYPDAPGEMVVLTCDTPEEDGITWTLDQSSEVLGSGKTLTIQVKEFGDAGQYTCHKGGEVLSHSLLLLHKKEDGIWSTDILKDQKEPKNKTFLRCEAKNYSGRFTCWWLTTISTDLTFSVKSSRGSSDPQGVTCGAATLSAERVRGDNKEYEYSVECQEDSASPAAEESLPIEVMVDAVHKLKYENYTSSFFIRDIIKPDPPKNLQLKPLKNSRQVEVSWEYPDTWSTPHSYFSLTFCVQVQGKSKREKKDRVFTDKTSATVICRKNASISVRAQDRCYSSSWSEWASVPCSPKSSDKTHTCPPCPAPEAAGGPSVFLFPPKPKDTLMISRTPEVTCVVVDVSHEDPEVKFNWYVDGVEVHNAKTKPREEQYNSTYRVVSVLTVLHQDWLNGKEYKCKVSNKALPAPIEKTISKAKGQPREPQVCTLPPSRDELTENQVSLTCLVKGFYPSDIAVEWESNGQPENNYKTTPPVLDSDGSFFLYSWLTVDKSRWQQGNVFSCSVMHEALHNHYTQKSLSLSPG

SEQ ID NO: 271 - protein, 536 aa, Artificial Sequence
  Description of Artificial Sequence: Synthetic polypeptide
IWELKKDVYVVELDWYPDAPGEMVVLTCDTPEEDGITWTLDQSSEVLGSGKTLTIQVKEFGDAGQYTCHKGGEVLSHSLLLLHKKEDGIWSTDILKDQKEPKNKTFLRCEAKNYSGRFTCWWLTTISTDLTFSVKSSRGSSDPQGVTCGAATLSAERVRGDNKEYEYSVECQEDSASPAAEESLPIEVMVDAVHKLKYENYTSSFFIRDIIKPDPPKNLQLKPLKNSRQVEVSWEYPDTWSTPHSYFSLTFCVQVQGKSKREKKDRVFTDKTSATVICRKNASISVRAQDRCYSSSWSEWASVPCSPKSSDKTHTCPPCPAPEAAGGPSVFLFPPKPKDTLMISRTPEVTCVVVDVSHEDPEVKFNWYVDGVEVHNAKTKPREEQYNSTYRVVSVLTVLHQDWLNGKEYKCKVSNKALAAPIEKTISKAKGQPREPQVCTLPPSRDELTENQVSLTCLVKGFYPSDIAVEWESNGQPENNYKTTPPVLDSDGSFFLYSWLTVDKSRWQQGNVFSCSVMHEALHNHYTQKSLSLSPG

SEQ ID NO: 272 - protein, 536 aa, Artificial Sequence
  Description of Artificial Sequence: Synthetic polypeptide
IWELKKDVYVVELDWYPDAPGEMVVLTCDTPEEDGITWTLDQSSEVLGSGKTLTIQVKEFGDAGQYTCHKGGEVLSHSLLLLHKKEDGIWSTDILKDQKEPKNKTFLRCEAKNYSGRFTCWWLTTISTDLTFSVKSSRGSSDPQGVTCGAATLSAERVRGDNKEYEYSVECQEDSASPAAEESLPIEVMVDAVHKLKYENYTSSFFIRDIIKPDPPKNLQLKPLKNSRQVEVSWEYPDTWSTPHSYFSLTFCVQVQGKSKREKKDRVFTDKTSATVICRKNASISVRAQDRCYSSSWSEWASVPCSPKSSDKTHTCPPCPAPEAEGAPSVFLFPPKPKDTLMISRTPEVTCVVVDVSHEDPEVKFNWYVDGVEVHNAKTKPREEQYNSTYRVVSVLTVLHQDWLNGKEYKCKVSNKALPSSIEKTISKAKGQPREPQVCTLPPSRDELTENQVSLTCLVKGFYPSDIAVEWESNGQPENNYKTTPPVLDSDGSFFLYSWLTVDKSRWQQGNVFSCSVMHEALHNHYTQKSLSLSPG

SEQ ID NO: 273 - protein, 536 aa, Artificial Sequence
  Description of Artificial Sequence: Synthetic polypeptide
IWELKKDVYVVELDWYPDAPGEMVVLTCDTPEEDGITWTLDQSSEVLGSGKTLTIQVKEFGDAGQYTCHKGGEVLSHSLLLLHKKEDGIWSTDILKDQKEPKNKTFLRCEAKNYSGRFTCWWLTTISTDLTFSVKSSRGSSDPQGVTCGAATLSAERVRGDNKEYEYSVECQEDSACPAAEESLPIEVMVDAVHKLKYENYTSSFFIRDIIKPDPPKNLQLKPLKNSRQVEVSWEYPDTWSTPHSYFSLTFCVQVQGKSKREKKDRVFTDKTSATVICRKNASISVRAQDRCYSSSWSEWASVPCSPKSSDKTHTCPPCPAPELLGGPSVFLFPPKPKDTLMISRTPEVTCVVVDVSHEDPEVKFNWYVDGVEVHNAKTKPREEQYNSTYRVVSVLTVLHQDWLNGKEYKCKVSNKALPAPIEKTISKAKGQPREPQVCTLPPSRDELTENQVSLTCLVKGFYPSDIAVEWESNGQPENNYKTTPPVLDSDGSFFLYSWLTVDKSRWQQGNVFSCSVMHEALHNHYTQKSLSLSPG

SEQ ID NO: 274 - protein, 536 aa, Artificial Sequence
  Description of Artificial Sequence: Synthetic polypeptide
IWELKKDVYVVELDWYPDAPGEMVVLTCDTPEEDGITWTLDQSSEVLGSGKTLTIQVKEFGDAGQYTCHKGGEVLSHSLLLLHKKEDGIWSTDILKDQKEPKNKTFLRCEAKNYSGRFTCWWLTTISTDLTFSVKSSRGSSDPQGVTCGAATLSAERVRGDNKEYEYSVECQEDSACPAAEESLPIEVMVDAVHKLKYENYTSSFFIRDIIKPDPPKNLQLKPLKNSRQVEVSWEYPDTWSTPHSYFSLTFCVQVQGKSKREKKDRVFTDKTSATVICRKNASISVRAQDRCYSSSWSEWASVPCSPKSSDKTHTCPPCPAPEAAGGPSVFLFPPKPKDTLMISRTPEVTCVVVDVSHEDPEVKFNWYVDGVEVHNAKTKPREEQYNSTYRVVSVLTVLHQDWLNGKEYKCKVSNKALPAPIEKTISKAKGQPREPQVCTLPPSRDELTENQVSLTCLVKGFYPSDIAVEWESNGQPENNYKTTPPVLDSDGSFFLYSWLTVDKSRWQQGNVFSCSVMHEALHNHYTQKSLSLSPG

SEQ ID NO: 275 - protein, 536 aa, Artificial Sequence
  Description of Artificial Sequence: Synthetic polypeptide
IWELKKDVYVVELDWYPDAPGEMVVLTCDTPEEDGITWTLDQSSEVLGSGKTLTIQVKEFGDAGQYTCHKGGEVLSHSLLLLHKKEDGIWSTDILKDQKEPKNKTFLRCEAKNYSGRFTCWWLTTISTDLTFSVKSSRGSSDPQGVTCGAATLSAERVRGDNKEYEYSVECQEDSACPAAEESLPIEVMVDAVHKLKYENYTSSFFIRDIIKPDPPKNLQLKPLKNSRQVEVSWEYPDTWSTPHSYFSLTFCVQVQGKSKREKKDRVFTDKTSATVICRKNASISVRAQDRCYSSSWSEWASVPCSPKSSDKTHTCPPCPAPEAAGGPSVFLFPPKPKDTLMISRTPEVTCVVVDVSHEDPEVKFNWYVDGVEVHNAKTKPREEQYNSTYRVVSVLTVLHQDWLNGKEYKCKVSNKALAAPIEKTISKAKGQPREPQVCTLPPSRDELTENQVSLTCLVKGFYPSDIAVEWESNGQPENNYKTTPPVLDSDGSFFLYSWLTVDKSRWQQGNVFSCSVMHEALHNHYTQKSLSLSPG

SEQ ID NO: 276 - protein, 536 aa, Artificial Sequence
  Description of Artificial Sequence: Synthetic polypeptide
IWELKKDVYVVELDWYPDAPGEMVVLTCDTPEEDGITWTLDQSSEVLGSGKTLTIQVKEFGDAGQYTCHKGGEVLSHSLLLLHKKEDGIWSTDILKDQKEPKNKTFLRCEAKNYSGRFTCWWLTTISTDLTFSVKSSRGSSDPQGVTCGAATLSAERVRGDNKEYEYSVECQEDSACPAAEESLPIEVMVDAVHKLKYENYTSSFFIRDIIKPDPPKNLQLKPLKNSRQVEVSWEYPDTWSTPHSYFSLTFCVQVQGKSKREKKDRVFTDKTSATVICRKNASISVRAQDRCYSSSWSEWASVPCSPKSSDKTHTCPPCPAPEAEGAPSVFLFPPKPKDTLMISRTPEVTCVVVDVSHEDPEVKFNWYVDGVEVHNAKTKPREEQYNSTYRVVSVLTVLHQDWLNGKEYKCKVSNKALPSSIEKTISKAKGQPREPQVCTLPPSRDELTENQVSLTCLVKGFYPSDIAVEWESNGQPENNYKTTPPVLDSDGSFFLYSWLTVDKSRWQQGNVFSCSVMHEALHNHYTQKSLSLSPG

SEQ ID NO: 277 - protein, 536 aa, Artificial Sequence; identical to SEQ ID NO: 274
  Description of Artificial Sequence: Synthetic polypeptide

SEQ ID NO: 278 - protein, 536 aa, Artificial Sequence; identical to SEQ ID NO: 275
  Description of Artificial Sequence: Synthetic polypeptide

SEQ ID NO: 279 - protein, 536 aa, Artificial Sequence; identical to SEQ ID NO: 276
  Description of Artificial Sequence: Synthetic polypeptide

SEQ ID NO: 280 - protein, 19 aa, Artificial Sequence
  Description of Artificial Sequence: Synthetic peptide
  MOD_RES (17)..(17): Leu or Glu
ESKYGPPCPPCPAPEFXGG

SEQ ID NO: 281 - protein, 18 aa, Artificial Sequence
  Description of Artificial Sequence: Synthetic peptide
  MOD_RES (16)..(16): Leu or Glu
SKYGPPCPPCPAPEFXGG

SEQ ID NO: 282 - protein, 19 aa, Artificial Sequence
  Description of Artificial Sequence: Synthetic peptide
ESKYGPPCPPCPAPEFLGG

SEQ ID NO: 283 - protein, 18 aa, Artificial Sequence
  Description of Artificial Sequence: Synthetic peptide
SKYGPPCPPCPAPEFLGG

SEQ ID NO: 284 - protein, 19 aa, Artificial Sequence
  Description of Artificial Sequence: Synthetic peptide
ESKYGPPCPPCPAPEFEGG

SEQ ID NO: 285 - protein, 18 aa, Artificial Sequence
  Description of Artificial Sequence: Synthetic peptide
SKYGPPCPPCPAPEFEGG

SEQ ID NO: 286 - protein, 544 aa, Artificial Sequence
  Description of Artificial Sequence: Synthetic polypeptide
MWELEKDVYVVEVDWTPDAPGETVNLTCDTPEEDDITWTSDQRHGVIGSGKTLTITVKEFLDAGQYTCHKGGETLSHSHLLLHKKENGIWSTEILKNFKNKTFLKCEAPNYSGRFTCSWLVQRNMDLKFNIKSSSSSPDSRAVTCGMASLSAEKVTLDQRDYEKYSVSCQEDVTCPTAEETLPIELALEARQQNKYENYSTSFFIRDIIKPDPPKNLQMKPLKNSQVEVSWEYPDSWSTPHSYFSLKFFVRIQRKKEKMKETEEGCNQKGAFLVEKTSTEVQCKGGNVCVQAQDRYYNSSCSKWACVPCRVRSPRGPTIKPCPPCKCPAPNLLGGPSVFIFPPKIKDVLMISLSPIVTCVVVDVSEDDPDVQISWFVNNVEVHTAQTQTHREDYNSTLRVVSALPIQHQDWMSGKEFKCKVNNKDLPAPIERTISKPKGSVRAPQVYVLPPPEEEMTEKQVTLTCMVTDFMPEDIYVEWTNNGKTELNYKNTEPVLDSDGSYFMYSWLRVEKKNWVERNSYSCSVVHEGLHNHHTTKSFSRTPG

SEQ ID NO: 287 - protein, 439 aa, Artificial Sequence
  Description of Artificial Sequence: Synthetic polypeptide
RVIPVSGPARCLSQSRNLLKTTDDMVKTAREKLKHYSCTAEDIDHEDITRDQTSTLKTCLPLELHKNESCLATRETSSTTRGSCLPPQKTSLMMTLCLGSIYEDLKMYQTEFQAINAALQNHNHQQIILDKGMLVAIDELMQSLNHNGETLRQKPPVGEADPYRVKMKLCILLHAFSTRVVTINRVMGYLSSAGGGGSGGGGSGGGGSPRGPTIKPCPPCKCPAPNLLGGPSVFIFPPKIKDVLMISLSPIVTCVVVDVSEDDPDVQISWFVNNVEVHTAQTQTHREDYNSTLRVVSALPIQHQDWMSGKEFKCKVNNKDLPAPIERTISKPKGSVRAPRVYVLPPPEEEMTKKQVTLTCMVTDFMPEDIYVEWTNNGKTELNYKNTEPVLVSDGSYTMYSKLRVEKKNWVERNSYSCSVVHEGLHNHHTTKSFSRTPG

SEQ ID NO: 288 - protein, 544 aa, Artificial Sequence
  Description of Artificial Sequence: Synthetic polypeptide
MWELEKDVYVVEVDWTPDAPGETVNLTCDTPEEDDITWTSDQRHGVIGSGKTLTITVKEFLDAGQYTCHKGGETLSHSHLLLHKKENGIWSTEILKNFKNKTFLKCEAPNYSGRFTCSWLVQRNMDLKFNIKSSSSSPDSRAVTCGMASLSAEKVTLDQRDYEKYSVSCQEDVTCPTAEETLPIELALEARQQNKYENYSTSFFIRDIIKPDPPKNLQMKPLKNSQVEVSWEYPDSWSTPHSYFSLKFFVRIQRKKEKMKETEEGCNQKGAFLVEKTSTEVQCKGGNVCVQAQDRYYNSSCSKWACVPCRVRSPRGPTIKPCPPCKCPAPNAAGGPSVFIFPPKIKDVLMISLSPIVTCVVVDVSEDDPDVQISWFVNNVEVHTAQTQTHREDYNSTLRVVSALPIQHQDWMSGKEFKCKVNNKDLGAPIERTISKPKGSVRAPQVYVLPPPEEEMTEKQVTLTCMVTDFMPEDIYVEWTNNGKTELNYKNTEPVLDSDGSYFMYSWLRVEKKNWVERNSYSCSVVHEGLHNHHTTKSFSRTPG

SEQ ID NO: 289 - protein, 439 aa, Artificial Sequence
  Description of Artificial Sequence: Synthetic polypeptide
RVIPVSGPARCLSQSRNLLKTTDDMVKTAREKLKHYSCTAEDIDHEDITRDQTSTLKTCLPLELHKNESCLATRETSSTTRGSCLPPQKTSLMMTLCLGSIYEDLKMYQTEFQAINAALQNHNHQQIILDKGMLVAIDELMQSLNHNGETLRQKPPVGEADPYRVKMKLCILLHAFSTRVVTINRVMGYLSSAGGGGSGGGGSGGGGSPRGPTIKPCPPCKCPAPNAAGGPSVFIFPPKIKDVLMISLSPIVTCVVVDVSEDDPDVQISWFVNNVEVHTAQTQTHREDYNSTLRVVSALPIQHQDWMSGKEFKCKVNNKDLGAPIERTISKPKGSVRAPRVYVLPPPEEEMTKKQVTLTCMVTDFMPEDIYVEWTNNGKTELNYKNTEPVLVSDGSYTMYSKLRVEKKNWVERNSYSCSVVHEGLHNHHTTKSFSRTPG

SEQ ID NO: 290 - protein, 536 aa, Artificial Sequence; identical to SEQ ID NO: 261
  Description of Artificial Sequence: Synthetic polypeptide

SEQ ID NO: 291 - protein, 443 aa, Artificial Sequence; identical to SEQ ID NO: 142
  Description of Artificial Sequence: Synthetic polypeptide

SEQ ID NO: 292 - protein, 558 aa, Artificial Sequence
  Description of Artificial Sequence: Synthetic polypeptide
MDMRVPAQLLGLLLLWLPGARCIWELKKDVYVVELDWYPDAPGEMVVLTCDTPEEDGITWTLDQSSEVLGSGKTLTIQVKEFGDAGQYTCHKGGEVLSHSLLLLHKKEDGIWSTDILKDQKEPKNKTFLRCEAKNYSGRFTCWWLTTISTDLTFSVKSSRGSSDPQGVTCGAATLSAERVRGDNKEYEYSVECQEDSACPAAEESLPIEVMVDAVHKLKYENYTSSFFIRDIIKPDPPKNLQLKPLKNSRQVEVSWEYPDTWSTPHSYFSLTFCVQVQGKSKREKKDRVFTDKTSATVICRKNASISVRAQDRYYSSSWSEWASVPCSPKSSDKTHTCPPCPAPEAAGGPSVFLFPPKPKDTLMISRTPEVTCVVVDVSHEDPEVKFNWYVDGVEVHNAKTKPREEQYNSTYRVVSVLTVLHQDWLNGKEYKCKVSNKALAAPIEKTISKAKGQPREPQVCTLPPSRDELTENQVSLTCLVKGFYPSDIAVEWESNGQPENNYKTTPPVLDSDGSFFLYSWLTVDKSRWQQGNVFSCSVMHEALHNHYTQKSLSLSPG

SEQ ID NO: 293 - protein, 465 aa, Artificial Sequence
  Description of Artificial Sequence: Synthetic polypeptide
MDMRVPAQLLGLLLLWLPGARCRNLPVATPDPGMFPCLHHSQNLLRAVSNMLQKARQTLEFYPCTSEEIDHEDITKDKTSTVEACLPLELTKNESCLNSRETSFITNGSCLASRKTSFMMALCLSSIYEDLKMYQVEFKTMNAKLLMDPKRQIFLDQNMLAVIDELMQALNFNSETVPQKSSLEEPDFYKTKIKLCILLHAFRIRAVTIDRVMSYLNASGGGGSGGGGSGGGGSEPKSSDKTHTCPPCPAPEAAGGPSVFLFPPKPKDTLMISRTPEVTCVVVDVSHEDPEVKFNWYVDGVEVHNAKTKPREEQYNSTYRVVSVLTVLHQDWLNGKEYKCKVSNKALAAPIEKTISKAKGQPREPRVYTLPPCRDELTKNQVSLTCLVKGFYPSDIAVEWESNGQPENNYKTTPPVLVSDGSFTLYSKLTVDKSRWQQGNVFSCSVMHEALHNHYTQKSLSLSPG

SEQ ID NO: 294 - protein, 40 aa, Artificial Sequence
  Description of Artificial Sequence: Synthetic polypeptide
  MISC_FEATURE (1)..(40): This sequence may encompass 1-20 "Gly Ser" repeating units
GSGSGSGSGSGSGSGSGSGSGSGSGSGSGSGSGSGSGSGS

SEQ ID NO: 295 - protein, 60 aa, Artificial Sequence
  Description of Artificial Sequence: Synthetic polypeptide
  MISC_FEATURE (1)..(60): This sequence may encompass 1-20 "Gly Gly Ser" repeating units
GGSGGSGGSGGSGGSGGSGGSGGSGGSGGSGGSGGSGGSGGSGGSGGSGGSGGSGGSGGS

SEQ ID NO: 296 - protein, 80 aa, Artificial Sequence
  Description of Artificial Sequence: Synthetic polypeptide
  MISC_FEATURE (1)..(80): This sequence may encompass 1-20 "Gly Gly Gly Ser" repeating units
GGGSGGGSGGGSGGGSGGGSGGGSGGGSGGGSGGGSGGGSGGGSGGGSGGGSGGGSGGGSGGGSGGGSGGGSGGGSGGGS

SEQ ID NO: 297 - protein, 80 aa, Artificial Sequence
  Description of Artificial Sequence: Synthetic polypeptide
  MISC_FEATURE (1)..(80): This sequence may encompass 1-20 "Gly Gly Ser Gly" repeating units
GGSGGGSGGGSGGGSGGGSGGGSGGGSGGGSGGGSGGGSGGGSGGGSGGGSGGGSGGGSGGGSGGGSGGGSGGGSGGGSG

SEQ ID NO: 298 - protein, 100 aa, Artificial Sequence; identical to SEQ ID NO: 120
  Description of Artificial Sequence: Synthetic polypeptide
  MISC_FEATURE (1)..(100): This sequence may encompass 1-20 "Gly Gly Ser Gly Gly" repeating units

SEQ ID NO: 299 - protein, 100 aa, Artificial Sequence; identical to SEQ ID NO: 119
  Description of Artificial Sequence: Synthetic polypeptide
  MISC_FEATURE (1)..(100): This sequence may encompass 1-20 "Gly Gly Gly Gly Ser" repeating units
